United States Patent Application Publication US 2026/0327608 A1 - sequence listing, part 2

SEQ ID NO: 7294 - DNA, 20 bp, synthetic construct
  misc_feature 1..20: note = Description of Artificial Sequence: Synthetic oligonucleotide
  misc_feature 1..20: note = Target: ANGPTL4; (-) strand; PAM type: NRG; PAM sequence: TGG
  source 1..20: mol_type = other DNA
agtgctgggggcagggcctg

SEQ ID NO: 7295 - DNA, 20 bp, synthetic construct
  misc_feature 1..20: note = Description of Artificial Sequence: Synthetic oligonucleotide
  misc_feature 1..20: note = Target: ANGPTL4; (-) strand; PAM type: NRG; PAM sequence: GGG
  source 1..20: mol_type = other DNA
tgcggggagtgctgggggca

SEQ ID NO: 7296 - DNA, 20 bp, synthetic construct
  misc_feature 1..20: note = Description of Artificial Sequence: Synthetic oligonucleotide
  misc_feature 1..20: note = Target: ANGPTL4; (-) strand; PAM type: NRG; PAM sequence: AGG
  source 1..20: mol_type = other DNA
gtgcggggagtgctgggggc

SEQ ID NO: 7297 - DNA, 20 bp, synthetic construct
  misc_feature 1..20: note = Description of Artificial Sequence: Synthetic oligonucleotide
  misc_feature 1..20: note = Target: ANGPTL4; (-) strand; PAM type: NRG; PAM sequence: CAG
  source 1..20: mol_type = other DNA
ggtgcggggagtgctggggg

SEQ ID NO: 7298 - DNA, 20 bp, synthetic construct
  misc_feature 1..20: note = Description of Artificial Sequence: Synthetic oligonucleotide
  misc_feature 1..20: note = Target: ANGPTL4; (-) strand; PAM type: NRG; PAM sequence: GGG
  source 1..20: mol_type = other DNA
cggggtgcggggagtgctgg

SEQ ID NO: 7299 - DNA, 20 bp, synthetic construct
  misc_feature 1..20: note = Description of Artificial Sequence: Synthetic oligonucleotide
  misc_feature 1..20: note = Target: ANGPTL4; (-) strand; PAM type: NRG; PAM sequence: GGG
  source 1..20: mol_type = other DNA
gcggggtgcggggagtgctg

SEQ ID NO: 7300 - DNA, 20 bp, synthetic construct
  misc_feature 1..20: note = Description of Artificial Sequence: Synthetic oligonucleotide
  misc_feature 1..20: note = Target: ANGPTL4; (-) strand; PAM type: NRG; PAM sequence: GGG
  source 1..20: mol_type = other DNA
ggcggggtgcggggagtgct

SEQ ID NO: 7301 - DNA, 20 bp, synthetic construct
  misc_feature 1..20: note = Description of Artificial Sequence: Synthetic oligonucleotide
  misc_feature 1..20: note = Target: ANGPTL4; (-) strand; PAM type: NRG; PAM sequence: TGG
  source 1..20: mol_type = other DNA
aggcggggtgcggggagtgc

SEQ ID NO: 7302 - DNA, 20 bp, synthetic construct
  misc_feature 1..20: note = Description of Artificial Sequence: Synthetic oligonucleotide
  misc_feature 1..20: note = Target: ANGPTL4; (-) strand; PAM type: NRG; PAM sequence: GAG
  source 1..20: mol_type = other DNA
tcttggaggcggggtgcggg

SEQ ID NO: 7303 - DNA, 20 bp, synthetic construct
  misc_feature 1..20: note = Description of Artificial Sequence: Synthetic oligonucleotide
  misc_feature 1..20: note = Target: ANGPTL4; (-) strand; PAM type: NRG; PAM sequence: GGG
  source 1..20: mol_type = other DNA
agtcttggaggcggggtgcg

SEQ ID NO: 7304 - DNA, 20 bp, synthetic construct
  misc_feature 1..20: note = Description of Artificial Sequence: Synthetic oligonucleotide
  misc_feature 1..20: note = Target: ANGPTL4; (-) strand; PAM type: NRG; PAM sequence: GGG
  source 1..20: mol_type = other DNA
gagtcttggaggcggggtgc

SEQ ID NO: 7305 - DNA, 20 bp, synthetic construct
  misc_feature 1..20: note = Description of Artificial Sequence: Synthetic oligonucleotide
  misc_feature 1..20: note = Target: ANGPTL4; (-) strand; PAM type: NRG; PAM sequence: CGG
  source 1..20: mol_type = other DNA
ggagtcttggaggcggggtg

SEQ ID NO: 7306 - DNA, 20 bp, synthetic construct
  misc_feature 1..20: note = Description of Artificial Sequence: Synthetic oligonucleotide
  misc_feature 1..20: note = Target: ANGPTL4; (-) strand; PAM type: NRG; PAM sequence: GGG
  source 1..20: mol_type = other DNA
gcggaggagtcttggaggcg

SEQ ID NO: 7307 - DNA, 20 bp, synthetic construct
  misc_feature 1..20: note = Description of Artificial Sequence: Synthetic oligonucleotide
  misc_feature 1..20: note = Target: ANGPTL4; (-) strand; PAM type: NRG; PAM sequence: GGG
  source 1..20: mol_type = other DNA
ggcggaggagtcttggaggc

SEQ ID NO: 7308 - DNA, 20 bp, synthetic construct
  misc_feature 1..20: note = Description of Artificial Sequence: Synthetic oligonucleotide
  misc_feature 1..20: note = Target: ANGPTL4; (-) strand; PAM type: NRG; PAM sequence: CGG
  source 1..20: mol_type = other DNA
gggcggaggagtcttggagg

SEQ ID NO: 7309 - DNA, 20 bp, synthetic construct
  misc_feature 1..20: note = Description of Artificial Sequence: Synthetic oligonucleotide
  misc_feature 1..20: note = Target: ANGPTL4; (-) strand; PAM type: NRG; PAM sequence: AGG
  source 1..20: mol_type = other DNA
agtgggcggaggagtcttgg

SEQ ID NO: 7310 - DNA, 20 bp, synthetic construct
  misc_feature 1..20: note = Description of Artificial Sequence: Synthetic oligonucleotide
  misc_feature 1..20: note = Target: ANGPTL4; (-) strand; PAM type: NRG; PAM sequence: GAG
  source 1..20: mol_type = other DNA
gagtgggcggaggagtcttg

SEQ ID NO: 7311 - DNA, 20 bp, synthetic construct
  misc_feature 1..20: note = Description of Artificial Sequence: Synthetic oligonucleotide
  misc_feature 1..20: note = Target: ANGPTL4; (-) strand; PAM type: NRG; PAM sequence: TGG
  source 1..20: mol_type = other DNA
cggagtgggcggaggagtct

SEQ ID NO: 7312 - DNA, 20 bp, synthetic construct
  misc_feature 1..20: note = Description of Artificial Sequence: Synthetic oligonucleotide
  misc_feature 1..20: note = Target: ANGPTL4; (-) strand; PAM type: NRG; PAM sequence: GAG
  source 1..20: mol_type = other DNA
tgggtgcggagtgggcggag

SEQ ID NO: 7313 - DNA, 20 bp, synthetic construct
  misc_feature 1..20: note = Description of Artificial Sequence: Synthetic oligonucleotide
  misc_feature 1..20: note = Target: ANGPTL4; (-) strand; PAM type: NRG; PAM sequence: AGG
  source 1..20: mol_type = other DNA
gttgggtgcggagtgggcgg

SEQ ID NO: 7314 - DNA, 20 bp, synthetic construct
  misc_feature 1..20: note = Description of Artificial Sequence: Synthetic oligonucleotide
  misc_feature 1..20: note = Target: ANGPTL4; (-) strand; PAM type: NRG; PAM sequence: GAG
  source 1..20: mol_type = other DNA
agttgggtgcggagtgggcg

SEQ ID NO: 7315 - DNA, 20 bp, synthetic construct
  misc_feature 1..20: note = Description of Artificial Sequence: Synthetic oligonucleotide
  misc_feature 1..20: note = Target: ANGPTL4; (-) strand; PAM type: NRG; PAM sequence: CGG
  source 1..20: mol_type = other DNA
taagttgggtgcggagtggg

SEQ ID NO: 7316 - DNA, 20 bp, synthetic construct
  misc_feature 1..20: note = Description of Artificial Sequence: Synthetic oligonucleotide
  misc_feature 1..20: note = Target: ANGPTL4; (-) strand; PAM type: NRG; PAM sequence: GGG
  source 1..20: mol_type = other DNA
ttataagttgggtgcggagt

SEQ ID NO: 7317 - DNA, 20 bp, synthetic construct
  misc_feature 1..20: note = Description of Artificial Sequence: Synthetic oligonucleotide
  misc_feature 1..20: note = Target: ANGPTL4; (-) strand; PAM type: NRG; PAM sequence: TGG
  source 1..20: mol_type = other DNA
tttataagttgggtgcggag

SEQ ID NO: 7318 - DNA, 20 bp, synthetic construct
  misc_feature 1..20: note = Description of Artificial Sequence: Synthetic oligonucleotide
  misc_feature 1..20: note = Target: ANGPTL4; (-) strand; PAM type: NRG; PAM sequence: GAG
  source 1..20: mol_type = other DNA
gtttttataagttgggtgcg

SEQ ID NO: 7319 - DNA, 20 bp, synthetic construct
  misc_feature 1..20: note = Description of Artificial Sequence: Synthetic oligonucleotide
  misc_feature 1..20: note = Target: ANGPTL4; (-) strand; PAM type: NRG; PAM sequence: CGG
  source 1..20: mol_type = other DNA
cggtttttataagttgggtg

SEQ ID NO: 7320 - DNA, 20 bp, synthetic construct
  misc_feature 1..20: note = Description of Artificial Sequence: Synthetic oligonucleotide
  misc_feature 1..20: note = Target: ANGPTL4; (-) strand; PAM type: NRG; PAM sequence: GGG
  source 1..20: mol_type = other DNA
gaggacggtttttataagtt

SEQ ID NO: 7321 - DNA, 20 bp, synthetic construct
  misc_feature 1..20: note = Description of Artificial Sequence: Synthetic oligonucleotide
  misc_feature 1..20: note = Target: ANGPTL4; (-) strand; PAM type: NRG; PAM sequence: TGG
  source 1..20: mol_type = other DNA
cgaggacggtttttataagt

SEQ ID NO: 7322 - DNA, 20 bp, synthetic construct
  misc_feature 1..20: note = Description of Artificial Sequence: Synthetic oligonucleotide
  misc_feature 1..20: note = Target: ANGPTL4; (-) strand; PAM type: NRG; PAM sequence: AAG
  source 1..20: mol_type = other DNA
cgcccgaggacggtttttat

SEQ ID NO: 7323 - DNA, 20 bp, synthetic construct
  misc_feature 1..20: note = Description of Artificial Sequence: Synthetic oligonucleotide
  misc_feature 1..20: note = Target: ANGPTL4; (-) strand; PAM type: NRG; PAM sequence: CGG
  source 1..20: mol_type = other DNA
ctccccgccgcgcccgagga

SEQ ID NO: 7324 - DNA, 20 bp, synthetic construct
  misc_feature 1..20: note = Description of Artificial Sequence: Synthetic oligonucleotide
  misc_feature 1..20: note = Target: ANGPTL4; (-) strand; PAM type: NRG; PAM sequence: AGG
  source 1..20: mol_type = other DNA
gcttctccccgccgcgcccg

SEQ ID NO: 7325 - DNA, 20 bp, synthetic construct
  misc_feature 1..20: note = Description of Artificial Sequence: Synthetic oligonucleotide
  misc_feature 1..20: note = Target: ANGPTL4; (-) strand; PAM type: NRG; PAM sequence: GAG
  source 1..20: mol_type = other DNA
ggcttctccccgccgcgccc

SEQ ID NO: 7326 - DNA, 20 bp, synthetic construct
  misc_feature 1..20: note = Description of Artificial Sequence: Synthetic oligonucleotide
  misc_feature 1..20: note = Target: ANGPTL4; (-) strand; PAM type: NRG; PAM sequence: CGG
  source 1..20: mol_type = other DNA
gtgtgaggatccgctcagct

SEQ ID NO: 7327 - DNA, 20 bp, synthetic construct
  misc_feature 1..20: note = Description of Artificial Sequence: Synthetic oligonucleotide
  misc_feature 1..20: note = Target: ANGPTL4; (-) strand; PAM type: NRG; PAM sequence: CAG
  source 1..20: mol_type = other DNA
cagtcgtgtgaggatccgct

SEQ ID NO: 7328 - DNA, 20 bp, synthetic construct
  misc_feature 1..20: note = Description of Artificial Sequence: Synthetic oligonucleotide
  misc_feature 1..20: note = Target: ANGPTL4; (-) strand; PAM type: NRG; PAM sequence: AGG
  source 1..20: mol_type = other DNA
aatcggatcacagtcgtgtg

SEQ ID NO: 7329 - DNA, 20 bp, synthetic construct
  misc_feature 1..20: note = Description of Artificial Sequence: Synthetic oligonucleotide
  misc_feature 1..20: note = Target: ANGPTL4; (-) strand; PAM type: NRG; PAM sequence: GAG
  source 1..20: mol_type = other DNA
gaatcggatcacagtcgtgt

SEQ ID NO: 7330 - DNA, 20 bp, synthetic construct
  misc_feature 1..20: note = Description of Artificial Sequence: Synthetic oligonucleotide
  misc_feature 1..20: note = Target: ANGPTL4; (-) strand; PAM type: NRG; PAM sequence: CAG
  source 1..20: mol_type = other DNA
cgctggaaagaatcggatca

SEQ ID NO: 7331 - DNA, 20 bp, synthetic construct
  misc_feature 1..20: note = Description of Artificial Sequence: Synthetic oligonucleotide
  misc_feature 1..20: note = Target: ANGPTL4; (-) strand; PAM type: NRG; PAM sequence: CGG
  source 1..20: mol_type = other DNA
cagaagccgctggaaagaat

SEQ ID NO: 7332 - DNA, 20 bp, synthetic construct
  misc_feature 1..20: note = Description of Artificial Sequence: Synthetic oligonucleotide
  misc_feature 1..20: note = Target: ANGPTL4; (-) strand; PAM type: NRG; PAM sequence: AAG
  source 1..20: mol_type = other DNA
tggttgcagaagccgctgga

SEQ ID NO: 7333 - DNA, 20 bp, synthetic construct
  misc_feature 1..20: note = Description of Artificial Sequence: Synthetic oligonucleotide
  misc_feature 1..20: note = Target: ANGPTL4; (-) strand; PAM type: NRG; PAM sequence: TGG
  source 1..20: mol_type = other DNA
cgcttggttgcagaagccgc

SEQ ID NO: 7334 - DNA, 20 bp, synthetic construct
  misc_feature 1..20: note = Description of Artificial Sequence: Synthetic oligonucleotide
  misc_feature 1..20: note = Target: ANGPTL4; (-) strand; PAM type: NRG; PAM sequence: AAG
  source 1..20: mol_type = other DNA
taagacccgcttggttgcag

SEQ ID NO: 7335 - DNA, 20 bp, synthetic construct
  misc_feature 1..20: note = Description of Artificial Sequence: Synthetic oligonucleotide
  misc_feature 1..20: note = Target: ANGPTL4; (-) strand; PAM type: NRG; PAM sequence: CAG
  source 1..20: mol_type = other DNA
gggtaagacccgcttggttg

SEQ ID NO: 7336 - DNA, 20 bp, synthetic construct
  misc_feature 1..20: note = Description of Artificial Sequence: Synthetic oligonucleotide
  misc_feature 1..20: note = Target: ANGPTL4; (-) strand; PAM type: NRG; PAM sequence: TGG
  source 1..20: mol_type = other DNA
gaccgggggtaagacccgct

SEQ ID NO: 7337 - DNA, 20 bp, synthetic construct
  misc_feature 1..20: note = Description of Artificial Sequence: Synthetic oligonucleotide
  misc_feature 1..20: note = Target: ANGPTL4; (-) strand; PAM type: NRG; PAM sequence: AAG
  source 1..20: mol_type = other DNA
agacgcggaggaccgggggt

SEQ ID NO: 7338 - DNA, 20 bp, synthetic construct
  misc_feature 1..20: note = Description of Artificial Sequence: Synthetic oligonucleotide
  misc_feature 1..20: note = Target: ANGPTL4; (-) strand; PAM type: NRG; PAM sequence: GGG
  source 1..20: mol_type = other DNA
ctggagacgcggaggaccgg

SEQ ID NO: 7339 - DNA, 20 bp, synthetic construct
  misc_feature 1..20: note = Description of Artificial Sequence: Synthetic oligonucleotide
  misc_feature 1..20: note = Target: ANGPTL4; (-) strand; PAM type: NRG; PAM sequence: GGG
  source 1..20: mol_type = other DNA
actggagacgcggaggaccg

SEQ ID NO: 7340 - DNA, 20 bp, synthetic construct
  misc_feature 1..20: note = Description of Artificial Sequence: Synthetic oligonucleotide
  misc_feature 1..20: note = Target: ANGPTL4; (-) strand; PAM type: NRG; PAM sequence: GGG
  source 1..20: mol_type = other DNA
gactggagacgcggaggacc

SEQ ID NO: 7341 - DNA, 20 bp, synthetic construct
  misc_feature 1..20: note = Description of Artificial Sequence: Synthetic oligonucleotide
  misc_feature 1..20: note = Target: ANGPTL4; (-) strand; PAM type: NRG; PAM sequence: CGG
  source 1..20: mol_type = other DNA
ggactggagacgcggaggac

SEQ ID NO: 7342 - DNA, 20 bp, synthetic construct
  misc_feature 1..20: note = Description of Artificial Sequence: Synthetic oligonucleotide
  misc_feature 1..20: note = Target: ANGPTL4; (-) strand; PAM type: NRG; PAM sequence: AGG
  source 1..20: mol_type = other DNA
tgcgaggactggagacgcgg

SEQ ID NO: 7343 - DNA, 20 bp, synthetic construct
  misc_feature 1..20: note = Description of Artificial Sequence: Synthetic oligonucleotide
  misc_feature 1..20: note = Target: ANGPTL4; (-) strand; PAM type: NRG; PAM sequence: GAG
  source 1..20: mol_type = other DNA
gtgcgaggactggagacgcg

SEQ ID NO: 7344 - DNA, 20 bp, synthetic construct
  misc_feature 1..20: note = Description of Artificial Sequence: Synthetic oligonucleotide
  misc_feature 1..20: note = Target: ANGPTL4; (-) strand; PAM type: NRG; PAM sequence: CGG
  source 1..20: mol_type = other DNA
aggtgcgaggactggagacg

SEQ ID NO: 7345 - DNA, 20 bp, synthetic construct
  misc_feature 1..20: note = Description of Artificial Sequence: Synthetic oligonucleotide
  misc_feature 1..20: note = Target: ANGPTL4; (-) strand; PAM type: NRG; PAM sequence: GAG
  source 1..20: mol_type = other DNA
ggttccaggtgcgaggactg

SEQ ID NO: 7346 - DNA, 20 bp, synthetic construct
  misc_feature 1..20: note = Description of Artificial Sequence: Synthetic oligonucleotide
  misc_feature 1..20: note = Target: ANGPTL4; (-) strand; PAM type: NRG; PAM sequence: TGG
  source 1..20: mol_type = other DNA
ggggttccaggtgcgaggac

SEQ ID NO: 7347 - DNA, 20 bp, synthetic construct
  misc_feature 1..20: note = Description of Artificial Sequence: Synthetic oligonucleotide
  misc_feature 1..20: note = Target: ANGPTL4; (-) strand; PAM type: NRG; PAM sequence: AGG
  source 1..20: mol_type = other DNA
acgttggggttccaggtgcg

SEQ ID NO: 7348 - DNA, 20 bp, synthetic construct
  misc_feature 1..20: note = Description of Artificial Sequence: Synthetic oligonucleotide
  misc_feature 1..20: note = Target: ANGPTL4; (-) strand; PAM type: NRG; PAM sequence: GAG
  source 1..20: mol_type = other DNA
gacgttggggttccaggtgc

SEQ ID NO: 7349 - DNA, 20 bp, synthetic construct
  misc_feature 1..20: note = Description of Artificial Sequence: Synthetic oligonucleotide
  misc_feature 1..20: note = Target: ANGPTL4; (-) strand; PAM type: NRG; PAM sequence: AGG
  source 1..20: mol_type = other DNA
ctcggggacgttggggttcc

SEQ ID NO: 7350 - DNA, 20 bp, synthetic construct
  misc_feature 1..20: note = Description of Artificial Sequence: Synthetic oligonucleotide
  misc_feature 1..20: note = Target: ANGPTL4; (-) strand; PAM type: NRG; PAM sequence: CAG
  source 1..20: mol_type = other DNA
tctcggggacgttggggttc

SEQ ID NO: 7351 - DNA, 20 bp, synthetic construct
  misc_feature 1..20: note = Description of Artificial Sequence: Synthetic oligonucleotide
  misc_feature 1..20: note = Target: ANGPTL4; (-) strand; PAM type: NRG; PAM sequence: GGG
  source 1..20: mol_type = other DNA
ggggactctcggggacgttg

SEQ ID NO: 7352 - DNA, 20 bp, synthetic construct
  misc_feature 1..20: note = Description of Artificial Sequence: Synthetic oligonucleotide
  misc_feature 1..20: note = Target: ANGPTL4; (-) strand; PAM type: NRG; PAM sequence: GGG
  source 1..20: mol_type = other DNA
cggggactctcggggacgtt

SEQ ID NO: 7353 - DNA, 20 bp, synthetic construct
  misc_feature 1..20: note = Description of Artificial Sequence: Synthetic oligonucleotide
  misc_feature 1..20: note = Target: ANGPTL4; (-) strand; PAM type: NRG; PAM sequence: TGG
  source 1..20: mol_type = other DNA
tcggggactctcggggacgt

SEQ ID NO: 7354 - DNA, 20 bp, synthetic construct
  misc_feature 1..20: note = Description of Artificial Sequence: Synthetic oligonucleotide
  misc_feature 1..20: note = Target: ANGPTL4; (-) strand; PAM type: NRG; PAM sequence: GGG
  source 1..20: mol_type = other DNA
cggggattcggggactctcg

SEQ ID NO: 7355 - DNA, 20 bp, synthetic construct
  misc_feature 1..20: note = Description of Artificial Sequence: Synthetic oligonucleotide
  misc_feature 1..20: note = Target: ANGPTL4; (-) strand; PAM type: NRG; PAM sequence: GGG
  source 1..20: mol_type = other DNA
gcggggattcggggactctc

SEQ ID NO: 7356 - DNA, 20 bp, synthetic construct
  misc_feature 1..20: note = Description of Artificial Sequence: Synthetic oligonucleotide
  misc_feature 1..20: note = Target: ANGPTL4; (-) strand; PAM type: NRG; PAM sequence: CGG
  source 1..20: mol_type = other DNA
agcggggattcggggactct

SEQ ID NO: 7357 - DNA, 20 bp, synthetic construct
  misc_feature 1..20: note = Description of Artificial Sequence: Synthetic oligonucleotide
  misc_feature 1..20: note = Target: ANGPTL4; (-) strand; PAM type: NRG; PAM sequence: GGG
  source 1..20: mol_type = other DNA
agcctgggagcggggattcg

SEQ ID NO: 7358 - DNA, 20 bp, synthetic construct
  misc_feature 1..20: note = Description of Artificial Sequence: Synthetic oligonucleotide
  misc_feature 1..20: note = Target: ANGPTL4; (-) strand; PAM type: NRG; PAM sequence: GGG
  source 1..20: mol_type = other DNA
tagcctgggagcggggattc

SEQ ID NO: 7359 - DNA, 20 bp, synthetic construct
  misc_feature 1..20: note = Description of Artificial Sequence: Synthetic oligonucleotide
  misc_feature 1..20: note = Target: ANGPTL4; (-) strand; PAM type: NRG; PAM sequence: CGG
  source 1..20: mol_type = other DNA
gtagcctgggagcggggatt

SEQ ID NO: 7360 - DNA, 20 bp, synthetic construct
  misc_feature 1..20: note = Description of Artificial Sequence: Synthetic oligonucleotide
  misc_feature 1..20: note = Target: ANGPTL4; (-) strand; PAM type: NRG; PAM sequence: GGG
  source 1..20: mol_type = other DNA
tcttaggtagcctgggagcg

SEQ ID NO: 7361 - DNA, 20 bp, synthetic construct
  misc_feature 1..20: note = Description of Artificial Sequence: Synthetic oligonucleotide
  misc_feature 1..20: note = Target: ANGPTL4; (-) strand; PAM type: NRG; PAM sequence: GGG
  source 1..20: mol_type = other DNA
ctcttaggtagcctgggagc

SEQ ID NO: 7362 - DNA, 20 bp, synthetic construct
  misc_feature 1..20: note = Description of Artificial Sequence: Synthetic oligonucleotide
  misc_feature 1..20: note = Target: ANGPTL4; (-) strand; PAM type: NRG; PAM sequence: CGG
  source 1..20: mol_type = other DNA
cctcttaggtagcctgggag

SEQ ID NO: 7363 - DNA, 20 bp, synthetic construct
  misc_feature 1..20: note = Description of Artificial Sequence: Synthetic oligonucleotide
  misc_feature 1..20: note = Target: ANGPTL4; (-) strand; PAM type: NRG; PAM sequence: GAG
  source 1..20: mol_type = other DNA
catcctcttaggtagcctgg

SEQ ID NO: 7364 - DNA, 20 bp, synthetic construct
  misc_feature 1..20: note = Description of Artificial Sequence: Synthetic oligonucleotide
  misc_feature 1..20: note = Target: ANGPTL4; (-) strand; PAM type: NRG; PAM sequence: GGG
  source 1..20: mol_type = other DNA
ctcatcctcttaggtagcct

SEQ ID NO: 7365 - DNA, 20 bp, synthetic construct
  misc_feature 1..20: note = Description of Artificial Sequence: Synthetic oligonucleotide
  misc_feature 1..20: note = Target: ANGPTL4; (-) strand; PAM type: NRG; PAM sequence: TGG
  source 1..20: mol_type = other DNA
gctcatcctcttaggtagcc

SEQ ID NO: 7366 - DNA, 20 bp, synthetic construct
  misc_feature 1..20: note = Description of Artificial Sequence: Synthetic oligonucleotide
  misc_feature 1..20: note = Target: ANGPTL4; (-) strand; PAM type: NRG; PAM sequence: TAG
  source 1..20: mol_type = other DNA
gcaccgctcatcctcttagg

SEQ ID NO: 7367 - DNA, 20 bp, synthetic construct
  misc_feature 1..20: note = Description of Artificial Sequence: Synthetic oligonucleotide
  misc_feature 1..20: note = Target: ANGPTL4; (-) strand; PAM type: NRG; PAM sequence: AGG
  source 1..20: mol_type = other DNA
ggagcaccgctcatcctctt

SEQ ID NO: 7368 - DNA, 20 bp, synthetic construct
  misc_feature 1..20: note = Description of Artificial Sequence: Synthetic oligonucleotide
  misc_feature 1..20: note = Target: ANGPTL4; (-) strand; PAM type: NRG; PAM sequence: TAG
  source 1..20: mol_type = other DNA
cggagcaccgctcatcctct

SEQ ID NO: 7369 - DNA, 20 bp, synthetic construct
  misc_feature 1..20: note = Description of Artificial Sequence: Synthetic oligonucleotide
  misc_feature 1..20: note = Target: ANGPTL4; (-) strand; PAM type: NRG; PAM sequence: GAG
  source 1..20: mol_type = other DNA
cagggctgccccggccgtcg

SEQ ID NO: 7370 - DNA, 20 bp, synthetic construct
  misc_feature 1..20: note = Description of Artificial Sequence: Synthetic oligonucleotide
  misc_feature 1..20: note = Target: ANGPTL4; (-) strand; PAM type: NRG; PAM sequence: CGG
  source 1..20: mol_type = other DNA
atcagggctgccccggccgt

SEQ ID NO: 7371 - DNA, 20 bp, synthetic construct
  misc_feature 1..20: note = Description of Artificial Sequence: Synthetic oligonucleotide
  misc_feature 1..20: note = Target: ANGPTL4; (-) strand; PAM type: NRG; PAM sequence: CGG
  source 1..20: mol_type = other DNA
gcagagcatcagggctgccc

SEQ ID NO: 7372 - DNA, 20 bp, synthetic construct
  misc_feature 1..20: note = Description of Artificial Sequence: Synthetic oligonucleotide
  misc_feature 1..20: note = Target: ANGPTL4; (-) strand; PAM type: NRG; PAM sequence: GGG
  source 1..20: mol_type = other DNA
ggtggcggcgcagagcatca

SEQ ID NO: 7373 - DNA, 20 bp, synthetic construct
  misc_feature 1..20: note = Description of Artificial Sequence: Synthetic oligonucleotide
  misc_feature 1..20: note = Target: ANGPTL4; (-) strand; PAM type: NRG; PAM sequence: AGG
  source 1..20: mol_type = other DNA
cggtggcggcgcagagcatc

SEQ ID NO: 7374 - DNA, 20 bp, synthetic construct
  misc_feature 1..20: note = Description of Artificial Sequence: Synthetic oligonucleotide
  misc_feature 1..20: note = Target: ANGPTL4; (-) strand; PAM type: NRG; PAM sequence: CAG
  source 1..20: mol_type = other DNA
gcggtggcggcgcagagcat

SEQ ID NO: 7375 - DNA, 20 bp, synthetic construct
  misc_feature 1..20: note = Description of Artificial Sequence: Synthetic oligonucleotide
  misc_feature 1..20: note = Target: ANGPTL4; (-) strand; PAM type: NRG; PAM sequence: GAG
  source 1..20: mol_type = other DNA
agcacggcggtggcggcgca

SEQ ID NO: 7376 - DNA, 20 bp, synthetic construct
  misc_feature 1..20: note = Description of Artificial Sequence: Synthetic oligonucleotide
  misc_feature 1..20: note = Target: ANGPTL4; (-) strand; PAM type: NRG; PAM sequence: CAG
  source 1..20: mol_type = other DNA
gtagcacggcggtggcggcg

SEQ ID NO: 7377 - DNA, 20 bp, synthetic construct
  misc_feature 1..20: note = Description of Artificial Sequence: Synthetic oligonucleotide
  misc_feature 1..20: note = Target: ANGPTL4; (-) strand; PAM type: NRG; PAM sequence: CGG
  source 1..20: mol_type = other DNA
gctcagtagcacggcggtgg

SEQ ID NO: 7378 - DNA, 20 bp, synthetic construct
  misc_feature 1..20: note = Description of Artificial Sequence: Synthetic oligonucleotide
  misc_feature 1..20: note = Target: ANGPTL4; (-) strand; PAM type: NRG; PAM sequence: TGG
  source 1..20: mol_type = other DNA
agcgctcagtagcacggcgg

SEQ ID NO: 7379 - DNA, 20 bp, synthetic construct
  misc_feature 1..20: note = Description of Artificial Sequence: Synthetic oligonucleotide
  misc_feature 1..20: note = Target: ANGPTL4; (-) strand; PAM type: NRG; PAM sequence: CGG
  source 1..20: mol_type = other DNA
ctgagcgctcagtagcacgg

SEQ ID NO: 7380 - DNA, 20 bp, synthetic construct
  misc_feature 1..20: note = Description of Artificial Sequence: Synthetic oligonucleotide
  misc_feature 1..20: note = Target: ANGPTL4; (-) strand; PAM type: NRG; PAM sequence: CGG
  source 1..20: mol_type = other DNA
gccctgagcgctcagtagca

SEQ ID NO: 7381 - DNA, 20 bp, synthetic construct
  misc_feature 1..20: note = Description of Artificial Sequence: Synthetic oligonucleotide
  misc_feature 1..20: note = Target: ANGPTL4; (-) strand; PAM type: NRG; PAM sequence: TAG
  source 1..20: mol_type = other DNA
ggtccgccctgagcgctcag

SEQ ID NO: 7382 - DNA, 20 bp, synthetic construct
  misc_feature 1..20: note = Description of Artificial Sequence: Synthetic oligonucleotide
  misc_feature 1..20: note = Target: ANGPTL4; (-) strand; PAM type: NRG; PAM sequence: CAG
  source 1..20: mol_type = other DNA
acgggtccgccctgagcgct

SEQ ID NO: 7383 - DNA, 20 bp, synthetic construct
  misc_feature 1..20: note = Description of Artificial Sequence: Synthetic oligonucleotide
  misc_feature 1..20: note = Target: ANGPTL4; (-) strand; PAM type: NRG; PAM sequence: GAG
  source 1..20: mol_type = other DNA
ggactgcacgggtccgccct

SEQ ID NO: 7384 - DNA, 20 bp, synthetic construct
  misc_feature 1..20: note = Description of Artificial Sequence: Synthetic oligonucleotide
  misc_feature 1..20: note = Target: ANGPTL4; (-) strand; PAM type: NRG; PAM sequence: GGG
  source 1..20: mol_type = other DNA
cgcggcgacttggactgcac

SEQ ID NO: 7385 - DNA, 20 bp, synthetic construct
  misc_feature 1..20: note = Description of Artificial Sequence: Synthetic oligonucleotide
  misc_feature 1..20: note = Target: ANGPTL4; (-) strand; PAM type: NRG; PAM sequence: CGG
  source 1..20: mol_type = other DNA
gcgcggcgacttggactgca

SEQ ID NO: 7386 - DNA, 20 bp, synthetic construct
  misc_feature 1..20: note = Description of Artificial Sequence: Synthetic oligonucleotide
  misc_feature 1..20: note = Target: ANGPTL4; (-) strand; PAM type: NRG; PAM sequence: TGG
  source 1..20: mol_type = other DNA
ggacgcaaagcgcggcgact

SEQ ID NO: 7387 - DNA, 20 bp, synthetic construct
  misc_feature 1..20: note = Description of Artificial Sequence: Synthetic oligonucleotide
  misc_feature 1..20: note = Target: ANGPTL4; (-) strand; PAM type: NRG; PAM sequence: CGG
  source 1..20: mol_type = other DNA
tcgtcccaggacgcaaagcg

SEQ ID NO: 7388 - DNA, 20 bp, synthetic construct
  misc_feature 1..20: note = Description of Artificial Sequence: Synthetic oligonucleotide
  misc_feature 1..20: note = Target: ANGPTL4; (-) strand; PAM type: NRG; PAM sequence: AAG
  source 1..20: mol_type = other DNA
tcatctcgtcccaggacgca

SEQ ID NO: 7389 - DNA, 20 bp, synthetic construct
  misc_feature 1..20: note = Description of Artificial Sequence: Synthetic oligonucleotide
  misc_feature 1..20: note = Target: ANGPTL4; (-) strand; PAM type: NRG; PAM sequence: AGG
  source 1..20: mol_type = other DNA
caggacattcatctcgtccc

SEQ ID NO: 7390 - DNA, 20 bp, synthetic construct
  misc_feature 1..20: note = Description of Artificial Sequence: Synthetic oligonucleotide
  misc_feature 1..20: note = Target: ANGPTL4; (-) strand; PAM type: NRG; PAM sequence: CAG
  source 1..20: mol_type = other DNA
ccaggacattcatctcgtcc

SEQ ID NO: 7391 - DNA, 20 bp, synthetic construct
  misc_feature 1..20: note = Description of Artificial Sequence: Synthetic oligonucleotide
  misc_feature 1..20: note = Target: ANGPTL4; (-) strand; PAM type: NRG; PAM sequence: AGG
  source 1..20: mol_type = other DNA
gctgcaggagtccgtgcgcc

SEQ ID NO: 7392 - DNA, 20 bp, synthetic construct
  misc_feature 1..20: note = Description of Artificial Sequence: Synthetic oligonucleotide
  misc_feature 1..20: note = Target: ANGPTL4; (-) strand; PAM type: NRG; PAM sequence: CAG
  source 1..20: mol_type = other DNA
agctgcaggagtccgtgcgc

SEQ ID NO: 7393 - DNA, 20 bp, synthetic construct
  misc_feature 1..20: note = Description of Artificial Sequence: Synthetic oligonucleotide
  misc_feature 1..20: note = Target: ANGPTL4; (-) strand; PAM type: NRG; PAM sequence: GAG
  source 1..20: mol_type = other DNA
agcccctggccgagctgcag

SEQ ID NO: 7394 - DNA, 20 bp, synthetic construct
  misc_feature 1..20: note = Description of Artificial Sequence: Synthetic oligonucleotide
  misc_feature 1..20: note = Target: ANGPTL4; (-) strand; PAM type: NRG; PAM sequence: AGG
  source 1..20: mol_type = other DNA
gcagcccctggccgagctgc

SEQ ID NO: 7395 - DNA, 20 bp, synthetic construct
  misc_feature 1..20: note = Description of Artificial Sequence: Synthetic oligonucleotide
  misc_feature 1..20: note = Target: ANGPTL4; (-) strand; PAM type: NRG; PAM sequence: CAG
  source 1..20: mol_type = other DNA
cgcagcccctggccgagctg

SEQ ID NO: 7396 - DNA, 20 bp, synthetic construct
  misc_feature 1..20: note = Description of Artificial Sequence: Synthetic oligonucleotide
  misc_feature 1..20: note = Target: ANGPTL4; (-) strand; PAM type: NRG; PAM sequence: GAG
  source 1..20: mol_type = other DNA
tgttcgcgcagcccctggcc

SEQ ID NO: 7397 - DNA, 20 bp, synthetic construct
  misc_feature 1..20: note = Description of Artificial Sequence: Synthetic oligonucleotide
  misc_feature 1..20: note = Target: ANGPTL4; (-) strand; PAM type: NRG; PAM sequence: TGG
  source 1..20: mol_type = other DNA
ccgcgtgttcgcgcagcccc

SEQ ID NO: 7398 - DNA, 20 bp, synthetic construct
  misc_feature 1..20: note = Description of Artificial Sequence: Synthetic oligonucleotide
  misc_feature 1..20: note = Target: ANGPTL4; (-) strand; PAM type: NRG; PAM sequence: CAG
  source 1..20: mol_type = other DNA
gtgcgctccgcgtgttcgcg

SEQ ID NO: 7399 - DNA, 20 bp, synthetic construct
  misc_feature 1..20: note = Description of Artificial Sequence: Synthetic oligonucleotide
  misc_feature 1..20: note = Target: ANGPTL4; (-) strand; PAM type: NRG; PAM sequence: GGG
  source 1..20: mol_type = other DNA
cagcgcgctcagctgactgc

SEQ ID NO: 7400 - DNA, 20 bp, synthetic construct
  misc_feature 1..20: note = Description of Artificial Sequence: Synthetic oligonucleotide
  misc_feature 1..20: note = Target: ANGPTL4; (-) strand; PAM type: NRG; PAM sequence: CGG
  source 1..20: mol_type = other DNA
ccagcgcgctcagctgactg

SEQ ID NO: 7401 - DNA, 20 bp, synthetic construct
  misc_feature 1..20: note = Description of Artificial Sequence: Synthetic oligonucleotide
  misc_feature 1..20: note = Target: ANGPTL4; (-) strand; PAM type: NRG; PAM sequence: CAG
  source 1..20: mol_type = other DNA
aggcgccgctccagcgcgct

SEQ ID NO: 7402 - DNA, 20 bp, synthetic construct
  misc_feature 1..20: note = Description of Artificial Sequence: Synthetic oligonucleotide
  misc_feature 1..20: note = Target: ANGPTL4; (-) strand; PAM type: NRG; PAM sequence: CAG
  source 1..20: mol_type = other DNA
cacgcgctcaggcgccgctc

SEQ ID NO: 7403 - DNA, 20 bp, synthetic construct
  misc_feature 1..20: note = Description of Artificial Sequence: Synthetic oligonucleotide
  misc_feature 1..20: note = Target: ANGPTL4; (-) strand; PAM type: NRG; PAM sequence: AGG
  source 1..20: mol_type = other DNA
aggcggacccgcacgcgctc

SEQ ID NO: 7404 - DNA, 20 bp, synthetic construct
  misc_feature 1..20: note = Description of Artificial Sequence: Synthetic oligonucleotide
  misc_feature 1..20: note = Target: ANGPTL4; (-) strand; PAM type: NRG; PAM sequence: CAG
  source 1..20: mol_type = other DNA
caggcggacccgcacgcgct

SEQ ID NO: 7405 - DNA, 20 bp, synthetic construct
  misc_feature 1..20: note = Description of Artificial Sequence: Synthetic oligonucleotide
  misc_feature 1..20: note = Target: ANGPTL4; (-) strand; PAM type: NRG; PAM sequence: CGG
  source 1..20: mol_type = other DNA
cccctcggttccctgacagg

SEQ ID NO: 7406 - DNA, 20 bp, synthetic construct
  misc_feature 1..20: note = Description of Artificial Sequence: Synthetic oligonucleotide
  misc_feature 1..20: note = Target: ANGPTL4; (-) strand; PAM type: NRG; PAM sequence: AGG
  source 1..20: mol_type = other DNA
ggacccctcggttccctgac

SEQ ID NO: 7407 - DNA, 20 bp, synthetic construct
  misc_feature 1..20: note = Description of Artificial Sequence: Synthetic oligonucleotide
  misc_feature 1..20: note = Target: ANGPTL4; (-) strand; PAM type: NRG; PAM sequence: CAG
  source 1..20: mol_type = other DNA
tggacccctcggttccctga

SEQ ID NO: 7408 - DNA, 20 bp, synthetic construct
  misc_feature 1..20: note = Description of Artificial Sequence: Synthetic oligonucleotide
  misc_feature 1..20: note = Target: ANGPTL4; (-) strand; PAM type: NRG; PAM sequence: CGG
  source 1..20: mol_type = other DNA
cgggaggtcggtggacccct

SEQ ID NO: 7409 - DNA, 20 bp, synthetic construct
  misc_feature 1..20: note = Description of Artificial Sequence: Synthetic oligonucleotide
  misc_feature 1..20: note = Target: ANGPTL4; (-) strand; PAM type: NRG; PAM sequence: TGG
  source 1..20: mol_type = other DNA
aggggctaacgggaggtcgg

SEQ ID NO: 7410 - DNA, 20 bp, synthetic construct
  misc_feature 1..20: note = Description of Artificial Sequence: Synthetic oligonucleotide
  misc_feature 1..20: note = Target: ANGPTL4; (-) strand; PAM type: NRG; PAM sequence: CGG
  source 1..20: mol_type = other DNA
ctcaggggctaacgggaggt

SEQ ID NO: 7411 - DNA, 20 bp, synthetic construct
  misc_feature 1..20: note = Description of Artificial Sequence: Synthetic oligonucleotide
  misc_feature 1..20: note = Target: ANGPTL4; (-) strand; PAM type: NRG; PAM sequence: AGG
  source 1..20: mol_type = other DNA
ggctctcaggggctaacggg

SEQ ID NO: 7412 - DNA, 20 bp, synthetic construct
  misc_feature 1..20: note = Description of Artificial Sequence: Synthetic oligonucleotide
  misc_feature 1..20: note = Target: ANGPTL4; (-) strand; PAM type: NRG; PAM sequence: GAG
  source 1..20: mol_type = other DNA
cggctctcaggggctaacgg

SEQ ID NO: 7413 - DNA, 20 bp, synthetic construct
  misc_feature 1..20: note = Description of Artificial Sequence: Synthetic oligonucleotide
  misc_feature 1..20: note = Target: ANGPTL4; (-) strand; PAM type: NRG; PAM sequence: GGG
  source 1..20: mol_type = other DNA
cccggctctcaggggctaac

SEQ ID NO: 7414 - DNA, 20 bp, synthetic construct
  misc_feature 1..20: note = Description of Artificial Sequence: Synthetic oligonucleotide
  misc_feature 1..20: note = Target: ANGPTL4; (-) strand; PAM type: NRG; PAM sequence: CGG
  source 1..20: mol_type = other DNA
acccggctctcaggggctaa

SEQ ID NO: 7415 - DNA, 20 bp, synthetic construct
  misc_feature 1..20: note = Description of Artificial Sequence: Synthetic oligonucleotide
  misc_feature 1..20: note = Target: ANGPTL4; (-) strand; PAM type: NRG; PAM sequence: GGG
  source 1..20: mol_type = other DNA
agggtccacccggctctcag

SEQ ID NO: 7416 - DNA, 20 bp, synthetic construct
  misc_feature 1..20: note = Description of Artificial Sequence: Synthetic oligonucleotide
  misc_feature 1..20: note = Target: ANGPTL4; (-) strand; PAM type: NRG; PAM sequence: GGG
  source 1..20: mol_type = other DNA
cagggtccacccggctctca

SEQ ID NO: 7417 - DNA, 20 bp, synthetic construct
  misc_feature 1..20: note = Description of Artificial Sequence: Synthetic oligonucleotide
  misc_feature 1..20: note = Target: ANGPTL4; (-) strand; PAM type: NRG; PAM sequence: AGG
  source 1..20: mol_type = other DNA
tcagggtccacccggctctc

SEQ ID NO: 7418 - DNA, 20 bp, synthetic construct
  misc_feature 1..20: note = Description of Artificial Sequence: Synthetic oligonucleotide
  misc_feature 1..20: note = Target: ANGPTL4; (-) strand; PAM type: NRG; PAM sequence: CAG
  source 1..20: mol_type = other DNA
ctcagggtccacccggctct

SEQ ID NO: 7419 - DNA, 20 bp, synthetic construct
  misc_feature 1..20: note = Description of Artificial Sequence: Synthetic oligonucleotide
  misc_feature 1..20: note = Target: ANGPTL4; (-) strand; PAM type: NRG; PAM sequence: CGG
  source 1..20: mol_type = other DNA
gaaggacctcagggtccacc

SEQ ID NO: 7420 - DNA, 20 bp, synthetic construct
  misc_feature 1..20: note = Description of Artificial Sequence: Synthetic oligonucleotide
  misc_feature 1..20: note = Target: ANGPTL4; (-) strand; PAM type: NRG; PAM sequence: GGG
  source 1..20: mol_type = other DNA
gcaggctgtgaaggacctca

SEQ ID NO: 7421 - DNA, 20 bp, synthetic construct
  misc_feature 1..20: note = Description of Artificial Sequence: Synthetic oligonucleotide
  misc_feature 1..20: note = Target: ANGPTL4; (-) strand; PAM type: NRG; PAM sequence: AGG
  source 1..20: mol_type = other DNA
tgcaggctgtgaaggacctc

SEQ ID NO: 7422 - DNA, 20 bp, synthetic construct
  misc_feature 1..20: note = Description of Artificial Sequence: Synthetic oligonucleotide
  misc_feature 1..20: note = Target: ANGPTL4; (-) strand; PAM type: NRG; PAM sequence: CAG
  source 1..20: mol_type = other DNA
ctgcaggctgtgaaggacct

SEQ ID NO: 7423 - DNA, 20 bp, synthetic construct
  misc_feature 1..20: note = Description of Artificial Sequence: Synthetic oligonucleotide
  misc_feature 1..20: note = Target: ANGPTL4; (-) strand; PAM type: NRG; PAM sequence: AGG
  source 1..20: mol_type = other DNA
cacgtacctgcaggctgtga

SEQ ID NO: 7424 - DNA, 20 bp, synthetic construct
  misc_feature 1..20: note = Description of Artificial Sequence: Synthetic oligonucleotide
  misc_feature 1..20: note = Target: ANGPTL4; (-) strand; PAM type: NRG; PAM sequence: AAG
  source 1..20: mol_type = other DNA
acacgtacctgcaggctgtg

SEQ ID NO: 7425 - DNA, 20 bp, synthetic construct
  misc_feature 1..20: note = Description of Artificial Sequence: Synthetic oligonucleotide
  misc_feature 1..20: note = Target: ANGPTL4; (-) strand; PAM type: NRG; PAM sequence: AGG
  source 1..20: mol_type = other DNA
ccctggggacacgtacctgc

SEQ ID NO: 7426 - DNA, 20 bp, synthetic construct
  misc_feature 1..20: note = Description of Artificial Sequence: Synthetic oligonucleotide
  misc_feature 1..20: note = Target: ANGPTL4; (-) strand; PAM type: NRG; PAM sequence: CAG
  source 1..20: mol_type = other DNA
gccctggggacacgtacctg

SEQ ID NO: 7427 - DNA, 20 bp, synthetic construct
  misc_feature 1..20: note = Description of Artificial Sequence: Synthetic oligonucleotide
  misc_feature 1..20: note = Target: ANGPTL4; (-) strand; PAM type: NRG; PAM sequence: GGG
  source 1..20: mol_type = other DNA
ggcgcggagaaccagccctg

SEQ ID NO: 7428 - DNA, 20 bp, synthetic construct
  misc_feature 1..20: note = Description of Artificial Sequence: Synthetic oligonucleotide
  misc_feature 1..20: note = Target: ANGPTL4; (-) strand; PAM type: NRG; PAM sequence: GGG
  source 1..20: mol_type = other DNA
gggcgcggagaaccagccct

SEQ ID NO: 7429 - DNA, 20 bp, synthetic construct
  misc_feature 1..20: note = Description of Artificial Sequence: Synthetic oligonucleotide
  misc_feature 1..20: note = Target: ANGPTL4; (-) strand; PAM type: NRG; PAM sequence: TGG
  source 1..20: mol_type = other DNA
ggggcgcggagaaccagccc

SEQ ID NO: 7430 - DNA, 20 bp, synthetic construct
  misc_feature 1..20: note = Description of Artificial Sequence: Synthetic oligonucleotide
  misc_feature 1..20: note = Target: ANGPTL4; (-) strand; PAM type: NRG; PAM sequence: CAG
  source 1..20: mol_type = other DNA
ccactaggggcgcggagaac

SEQ ID NO: 7431 - DNA, 20 bp, synthetic construct
  misc_feature 1..20: note = Description of Artificial Sequence: Synthetic oligonucleotide
  misc_feature 1..20: note = Target: ANGPTL4; (-) strand; PAM type: NRG; PAM sequence: GAG
  source 1..20: mol_type = other DNA
ggagagccactaggggcgcg

SEQ ID NO: 7432 - DNA, 20 bp, synthetic construct
  misc_feature 1..20: note = Description of Artificial Sequence: Synthetic oligonucleotide
  misc_feature 1..20: note = Target: ANGPTL4; (-) strand; PAM type: NRG; PAM sequence: CGG
  source 1..20: mol_type = other DNA
caggagagccactaggggcg

SEQ ID NO: 7433 - DNA, 20 bp, synthetic construct
  misc_feature 1..20: note = Description of Artificial Sequence: Synthetic oligonucleotide
  misc_feature 1..20: note = Target: ANGPTL4; (-) strand; PAM type: NRG; PAM sequence: GGG
  source 1..20: mol_type = other DNA
caagccaggagagccactag

SEQ ID NO: 7434 - DNA, 20 bp, synthetic construct
  misc_feature 1..20: note = Description of Artificial Sequence: Synthetic oligonucleotide
  misc_feature 1..20: note = Target: ANGPTL4; (-) strand; PAM type: NRG; PAM sequence: GGG
  source 1..20: mol_type = other DNA
ccaagccaggagagccacta

SEQ ID NO: 7435 - DNA, 20 bp, synthetic construct
  misc_feature 1..20: note = Description of Artificial Sequence: Synthetic oligonucleotide
  misc_feature 1..20: note = Target: ANGPTL4; (-) strand; PAM type: NRG; PAM sequence: AGG
  source 1..20: mol_type = other DNA
tccaagccaggagagccact

SEQ ID NO: 7436 - DNA, 20 bp, synthetic construct
  misc_feature 1..20: note = Description of Artificial Sequence: Synthetic oligonucleotide
  misc_feature 1..20: note = Target: ANGPTL4; (-) strand; PAM type: NRG; PAM sequence: TAG
  source 1..20: mol_type = other DNA
ttccaagccaggagagccac

SEQ ID NO: 7437 - DNA, 20 bp, synthetic construct
  misc_feature 1..20: note = Description of Artificial Sequence: Synthetic oligonucleotide
  misc_feature 1..20: note = Target: ANGPTL4; (-) strand; PAM type: NRG; PAM sequence: GAG
  source 1..20: mol_type = other DNA
catacccttccaagccagga

SEQ ID NO: 7438 - DNA, 20 bp, synthetic construct
  misc_feature 1..20: note = Description of Artificial Sequence: Synthetic oligonucleotide
  misc_feature 1..20: note = Target: ANGPTL4; (-) strand; PAM type: NRG; PAM sequence: GAG
  source 1..20: mol_type = other DNA
tccatacccttccaagccag

SEQ ID NO: 7439 - DNA, 20 bp, synthetic construct
  misc_feature 1..20: note = Description of Artificial Sequence: Synthetic oligonucleotide
  misc_feature 1..20: note = Target: ANGPTL4; (-) strand; PAM type: NRG; PAM sequence: AGG
  source 1..20: mol_type = other DNA
tgtccatacccttccaagcc

SEQ ID NO: 7440 - DNA, 20 bp, synthetic construct
  misc_feature 1..20: note = Description of Artificial Sequence: Synthetic oligonucleotide
  misc_feature 1..20: note = Target: ANGPTL4; (-) strand; PAM type: NRG; PAM sequence: CAG
  source 1..20: mol_type = other DNA
ctgtccatacccttccaagc

SEQ ID NO: 7441 - DNA, 20 bp, synthetic construct
  misc_feature 1..20: note = Description of Artificial Sequence: Synthetic oligonucleotide
  misc_feature 1..20: note = Target: ANGPTL4; (-) strand; PAM type: NRG; PAM sequence: AAG
  source 1..20: mol_type = other DNA
actcctgtccatacccttcc

SEQ ID NO: 7442 - DNA, 20 bp, synthetic construct
  misc_feature 1..20: note = Description of Artificial Sequence: Synthetic oligonucleotide
  misc_feature 1..20: note = Target: ANGPTL4; (-) strand; PAM type: NRG; PAM sequence: CAG
  source 1..20: mol_type = other DNA
cagggaagcccagggagcca

SEQ ID NO: 7443 - DNA, 20 bp, synthetic construct
  misc_feature 1..20: note = Description of Artificial Sequence: Synthetic oligonucleotide
  misc_feature 1..20: note = Target: ANGPTL4; (-) strand; PAM type: NRG; PAM sequence: GAG
  source 1..20: mol_type = other DNA
ttgacgcagggaagcccagg

SEQ ID NO: 7444 - DNA, 20 bp, synthetic construct
  misc_feature 1..20: note = Description of Artificial Sequence: Synthetic oligonucleotide
  misc_feature 1..20: note = Target: ANGPTL4; (-) strand; PAM type: NRG; PAM sequence: GGG
  source 1..20: mol_type = other DNA
ccttgacgcagggaagccca

SEQ ID NO: 7445 - DNA, 20 bp, synthetic construct
  misc_feature 1..20: note = Description of Artificial Sequence: Synthetic oligonucleotide
  misc_feature 1..20: note = Target: ANGPTL4; (-) strand; PAM type: NRG; PAM sequence: AGG
  source 1..20: mol_type = other DNA
cccttgacgcagggaagccc

SEQ ID NO: 7446 - DNA, 20 bp, synthetic construct
  misc_feature 1..20: note = Description of Artificial Sequence: Synthetic oligonucleotide
  misc_feature 1..20: note = Target: ANGPTL4; (-) strand; PAM type: NRG; PAM sequence: CAG
  source 1..20: mol_type = other DNA
tcccttgacgcagggaagcc

SEQ ID NO: 7447 - DNA, 20 bp, synthetic construct
  misc_feature 1..20: note = Description of Artificial Sequence: Synthetic oligonucleotide
  misc_feature 1..20: note = Target: ANGPTL4; (-) strand; PAM type: NRG; PAM sequence: AAG
  source 1..20: mol_type = other DNA
gcccatcccttgacgcaggg

SEQ ID NO: 7448 - DNA, 20 bp, synthetic construct
  misc_feature 1..20: note = Description of Artificial Sequence: Synthetic oligonucleotide
  misc_feature 1..20: note = Target: ANGPTL4; (-) strand; PAM type: NRG; PAM sequence: GGG
  source 1..20: mol_type = other DNA
ggagcccatcccttgacgca

SEQ ID NO: 7449 - DNA, 20 bp, synthetic construct
  misc_feature 1..20: note = Description of Artificial Sequence: Synthetic oligonucleotide
  misc_feature 1..20: note = Target: ANGPTL4; (-) strand; PAM type: NRG; PAM sequence: AGG
  source 1..20: mol_type = other DNA
gggagcccatcccttgacgc

SEQ ID NO: 7450 - DNA, 20 bp, synthetic construct
  misc_feature 1..20: note = Description of Artificial Sequence: Synthetic oligonucleotide
  misc_feature 1..20: note = Target: ANGPTL4; (-) strand; PAM type: NRG; PAM sequence: CAG
  source 1..20: mol_type = other DNA
ggggagcccatcccttgacg

SEQ ID NO: 7451 - DNA, 20 bp, synthetic construct
  misc_feature 1..20: note = Description of Artificial Sequence: Synthetic oligonucleotide
  misc_feature 1..20: note = Target: ANGPTL4; (-) strand; PAM type: NRG; PAM sequence: GAG
  source 1..20: mol_type = other DNA
tcctcggcttcctaaggggg

SEQ ID NO: 7452 - DNA, 20 bp, synthetic construct
  misc_feature 1..20: note = Description of Artificial Sequence: Synthetic oligonucleotide
  misc_feature 1..20: note = Target: ANGPTL4; (-) strand; PAM type: NRG; PAM sequence: GGG
  source 1..20: mol_type = other DNA
cctcctcggcttcctaaggg

SEQ ID NO: 7453 - DNA, 20 bp, synthetic construct
  misc_feature 1..20: note = Description of Artificial Sequence: Synthetic oligonucleotide
  misc_feature 1..20: note = Target: ANGPTL4; (-) strand; PAM type: NRG; PAM sequence: GGG
  source 1..20: mol_type = other DNA
ccctcctcggcttcctaagg

SEQ ID NO: 7454 - DNA, 20 bp, synthetic construct
  misc_feature 1..20: note = Description of Artificial Sequence: Synthetic oligonucleotide
  misc_feature 1..20: note = Target: ANGPTL4; (-) strand; PAM type: NRG; PAM sequence: GGG
  source 1..20: mol_type = other DNA
tccctcctcggcttcctaag

SEQ ID NO: 7455 - DNA, 20 bp, synthetic construct
  misc_feature 1..20: note = Description of Artificial Sequence: Synthetic oligonucleotide
  misc_feature 1..20: note = Target: ANGPTL4; (-) strand; PAM type: NRG; PAM sequence: GGG
  source 1..20: mol_type = other DNA
ctccctcctcggcttcctaa

SEQ ID NO: 7456 - DNA, 20 bp, synthetic construct
  misc_feature 1..20: note = Description of Artificial Sequence: Synthetic oligonucleotide
  misc_feature 1..20: note = Target: ANGPTL4; (-) strand; PAM type: NRG; PAM sequence: AGG
  source 1..20: mol_type = other DNA
cctccctcctcggcttccta

SEQ ID NO: 7457 - DNA, 20 bp, synthetic construct
  misc_feature 1..20: note = Description of Artificial Sequence: Synthetic oligonucleotide
  misc_feature 1..20: note = Target: ANGPTL4; (-) strand; PAM type: NRG; PAM sequence: AAG
  source 1..20: mol_type = other DNA
acctccctcctcggcttcct

SEQ ID NO: 7458 - DNA, 20 bp, synthetic construct
  misc_feature 1..20: note = Description of Artificial Sequence: Synthetic oligonucleotide
  misc_feature 1..20: note = Target: ANGPTL4; (-) strand; PAM type: NRG; PAM sequence: CGG
  source 1..20: mol_type = other DNA
cttgagcgaacctccctcct

SEQ ID NO: 7459 - DNA, 20 bp, synthetic construct
  misc_feature 1..20: note = Description of Artificial Sequence: Synthetic oligonucleotide
  misc_feature 1..20: note = Target: ANGPTL4; (-) strand; PAM type: NRG; PAM sequence: GAG
  source 1..20: mol_type = other DNA
ggtcttgaattcctggcctt

SEQ ID NO: 7460 - DNA, 20 bp, synthetic construct
  misc_feature 1..20: note = Description of Artificial Sequence: Synthetic oligonucleotide
  misc_feature 1..20: note = Target: ANGPTL4; (-) strand; PAM type: NRG; PAM sequence: TGG
  source 1..20: mol_type = other DNA
tttaggtggtcttgaattcc

SEQ ID NO: 7461 - DNA, 20 bp, synthetic construct
  misc_feature 1..20: note = Description of Artificial Sequence: Synthetic oligonucleotide
  misc_feature 1..20: note = Target: ANGPTL4; (-) strand; PAM type: NRG; PAM sequence: TGG
  source 1..20: mol_type = other DNA
tctcgctattttgctttagg

SEQ ID NO: 7462 - DNA, 20 bp, synthetic construct
  misc_feature 1..20: note = Description of Artificial Sequence: Synthetic oligonucleotide
  misc_feature 1..20: note = Target: ANGPTL4; (-) strand; PAM type: NRG; PAM sequence: AGG
  source 1..20: mol_type = other DNA
gggtctcgctattttgcttt

SEQ ID NO: 7463 - DNA, 20 bp, synthetic construct
  misc_feature 1..20: note = Description of Artificial Sequence: Synthetic oligonucleotide
  misc_feature 1..20: note = Target: ANGPTL4; (-) strand; PAM type: NRG; PAM sequence: TAG
  source 1..20: mol_type = other DNA
ggggtctcgctattttgctt

SEQ ID NO: 7464 - DNA, 20 bp, synthetic construct
  misc_feature 1..20: note = Description of Artificial Sequence: Synthetic oligonucleotide
  misc_feature 1..20: note = Target: ANGPTL4; (-) strand; PAM type: NRG; PAM sequence: GGG
  source 1..20: mol_type = other DNA
tgtgtgtgtagaagagacgg

SEQ ID NO: 7465 - DNA, 20 bp, synthetic construct
  misc_feature 1..20: note = Description of Artificial Sequence: Synthetic oligonucleotide
  misc_feature 1..20: note = Target: ANGPTL4; (-) strand; PAM type: NRG; PAM sequence: GGG
  source 1..20: mol_type = other DNA
gtgtgtgtgtagaagagacg

SEQ ID NO: 7466 - DNA, 20 bp, synthetic construct
  misc_feature 1..20: note = Description of Artificial Sequence: Synthetic oligonucleotide
  misc_feature 1..20: note = Target: ANGPTL4; (-) strand; PAM type: NRG; PAM sequence: GGG
  source 1..20: mol_type = other DNA
tgtgtgtgtgtagaagagac

SEQ ID NO: 7467 - DNA, 20 bp, synthetic construct
  misc_feature 1..20: note = Description of Artificial Sequence: Synthetic oligonucleotide
  misc_feature 1..20: note = Target: ANGPTL4; (-) strand; PAM type: NRG; PAM sequence: CGG
  source 1..20: mol_type = other DNA
gtgtgtgtgtgtagaagaga

SEQ ID NO: 7468 - DNA, 20 bp, synthetic construct
  misc_feature 1..20: note = Description of Artificial Sequence: Synthetic oligonucleotide
  misc_feature 1..20: note = Target: ANGPTL4; (-) strand; PAM type: NRG; PAM sequence: GAG
  source 1..20: mol_type = other DNA
gtgtgtgtgtgtgtgtagaa

SEQ ID NO: 7469 - DNA, 20 bp, synthetic construct
  misc_feature 1..20: note = Description of Artificial Sequence: Synthetic oligonucleotide
  misc_feature 1..20: note = Target: ANGPTL4; (-) strand; PAM type: NRG; PAM sequence: AAG
  source 1..20: mol_type = other DNA
gtgtgtgtgtgtgtgtgtag

SEQ ID NO: 7470 - DNA, 20 bp, synthetic construct
  misc_feature 1..20: note = Description of Artificial Sequence: Synthetic oligonucleotide
  misc_feature 1..20: note = Target: ANGPTL4; (-) strand; PAM type: NRG; PAM sequence: TAG
  source 1..20: mol_type = other DNA
tgtgtgtgtgtgtgtgtgtg

SEQ ID NO: 7471 - DNA, 20 bp, synthetic construct
  misc_feature 1..20: note = Description of Artificial Sequence: Synthetic oligonucleotide
  misc_feature 1..20: note = Target: ANGPTL4; (-) strand; PAM type: NRG; PAM sequence: CGG
  source 1..20: mol_type = other DNA
gctccgtgagccactgcgcc

SEQ ID NO: 7472 - DNA, 20 bp, synthetic construct
  misc_feature 1..20: note = Description of Artificial Sequence: Synthetic oligonucleotide
  misc_feature 1..20: note = Target: ANGPTL4; (-) strand; PAM type: NRG; PAM sequence: GAG
  source 1..20: mol_type = other DNA
acagcaggtggaggctccgt

SEQ ID NO: 7473 - DNA, 20 bp, synthetic construct
  misc_feature 1..20: note = Description of Artificial Sequence: Synthetic oligonucleotide
  misc_feature 1..20: note = Target: ANGPTL4; (-) strand; PAM type: NRG; PAM sequence: AGG
  source 1..20: mol_type = other DNA
ctagtctcgacagcaggtgg

SEQ ID NO: 7474 - DNA, 20 bp, synthetic construct
  misc_feature 1..20: note = Description of Artificial Sequence: Synthetic oligonucleotide
  misc_feature 1..20: note = Target: ANGPTL4; (-) strand; PAM type: NRG; PAM sequence: GAG
  source 1..20: mol_type = other DNA
gctagtctcgacagcaggtg

SEQ ID NO: 7475 - DNA, 20 bp, synthetic construct
  misc_feature 1..20: note = Description of Artificial Sequence: Synthetic oligonucleotide
  misc_feature 1..20: note = Target: ANGPTL4; (-) strand; PAM type: NRG; PAM sequence: TGG
  source 1..20: mol_type = other DNA
aggctagtctcgacagcagg

SEQ ID NO: 7476 - DNA, 20 bp, synthetic construct
  misc_feature 1..20: note = Description of Artificial Sequence: Synthetic oligonucleotide
  misc_feature 1..20: note = Target: ANGPTL4; (-) strand; PAM type: NRG; PAM sequence: AGG
  source 1..20: mol_type = other DNA
gccaggctagtctcgacagc

SEQ ID NO: 7477 - DNA, 20 bp, synthetic construct
  misc_feature 1..20: note = Description of Artificial Sequence: Synthetic oligonucleotide
  misc_feature 1..20: note = Target: ANGPTL4; (-) strand; PAM type: NRG; PAM sequence: CAG
  source 1..20: mol_type = other DNA
ggccaggctagtctcgacag

SEQ ID NO: 7478 - DNA, 20 bp, synthetic construct
  misc_feature 1..20: note = Description of Artificial Sequence: Synthetic oligonucleotide
  misc_feature 1..20: note = Target: ANGPTL4; (-) strand; PAM type: NRG; PAM sequence: CAG
  source 1..20: mol_type = other DNA
gttggccaggctagtctcga

SEQ ID NO: 7479 - DNA, 20 bp, synthetic construct
  misc_feature 1..20: note = Description of Artificial Sequence: Synthetic oligonucleotide
  misc_feature 1..20: note = Target: ANGPTL4; (-) strand; PAM type: NRG; PAM sequence: TAG
  source 1..20: mol_type = other DNA
tttctccatgttggccaggc

SEQ ID NO: 7480 - DNA, 20 bp, synthetic construct
  misc_feature 1..20: note = Description of Artificial Sequence: Synthetic oligonucleotide
  misc_feature 1..20: note = Target: ANGPTL4; (-) strand; PAM type: NRG; PAM sequence: AGG
  source 1..20: mol_type = other DNA
gaggtttctccatgttggcc

SEQ ID NO: 7481 - DNA, 20 bp, synthetic construct
  misc_feature 1..20: note = Description of Artificial Sequence: Synthetic oligonucleotide
  misc_feature 1..20: note = Target: ANGPTL4; (-) strand; PAM type: NRG; PAM sequence: CAG
  source 1..20: mol_type = other DNA
cgaggtttctccatgttggc

SEQ ID NO: 7482 - DNA, 20 bp, synthetic construct
  misc_feature 1..20: note = Description of Artificial Sequence: Synthetic oligonucleotide
  misc_feature 1..20: note = Target: ANGPTL4; (-) strand; PAM type: NRG; PAM sequence: TGG
  source 1..20: mol_type = other DNA
gagacgaggtttctccatgt

SEQ ID NO: 7483 - DNA, 20 bp, synthetic construct
  misc_feature 1..20: note = Description of Artificial Sequence: Synthetic oligonucleotide
  misc_feature 1..20: note = Target: ANGPTL4; (-) strand; PAM type: NRG; PAM sequence: AGG
  source 1..20: mol_type = other DNA
ttgtatttttagtagagacg

SEQ ID NO: 7484 - DNA, 20 bp, synthetic construct
  misc_feature 1..20: note = Description of Artificial Sequence: Synthetic oligonucleotide
  misc_feature 1..20: note = Target: ANGPTL4; (-) strand; PAM type: NRG; PAM sequence: GAG
  source 1..20: mol_type = other DNA
tttgtatttttagtagagac

SEQ ID NO: 7485 - DNA, 20 bp, synthetic construct
  misc_feature 1..20: note = Description of Artificial Sequence: Synthetic oligonucleotide
  misc_feature 1..20: note = Target: ANGPTL4; (-) strand; PAM type: NRG; PAM sequence: GAG
  source 1..20: mol_type = other DNA
aattttttgtatttttagta

SEQ ID NO: 7486 - DNA, 20 bp, synthetic construct
  misc_feature 1..20: note = Description of Artificial Sequence: Synthetic oligonucleotide
  misc_feature 1..20: note = Target: ANGPTL4; (-) strand; PAM type: NRG; PAM sequence: TAG
  source 1..20: mol_type = other DNA
ctaattttttgtatttttag

SEQ ID NO: 7487 - DNA, 20 bp, synthetic construct
  misc_feature 1..20: note = Description of Artificial Sequence: Synthetic oligonucleotide
  misc_feature 1..20: note = Target: ANGPTL4; (-) strand; PAM type: NRG; PAM sequence: TAG
  source 1..20: mol_type = other DNA
aggctaattttttgtatttt

SEQ ID NO: 7488 - DNA, 20 bp, synthetic construct
  misc_feature 1..20: note = Description of Artificial Sequence: Synthetic oligonucleotide
  misc_feature 1..20: note = Target: ANGPTL4; (-) strand; PAM type: NRG; PAM sequence: AGG
  source 1..20: mol_type = other DNA
acaggcatgcacaccatgcc

SEQ ID NO: 7489 - DNA, 20 bp, synthetic construct
  misc_feature 1..20: note = Description of Artificial Sequence: Synthetic oligonucleotide
  misc_feature 1..20: note = Target: ANGPTL4; (-) strand; PAM type: NRG; PAM sequence: CAG
  source 1..20: mol_type = other DNA
tacaggcatgcacaccatgc

SEQ ID NO: 7490 - DNA, 20 bp, synthetic construct
  misc_feature 1..20: note = Description of Artificial Sequence: Synthetic oligonucleotide
  misc_feature 1..20: note = Target: ANGPTL4; (-) strand; PAM type: NRG; PAM sequence: AGG
  source 1..20: mol_type = other DNA
tcccaagtagctgggattac

SEQ ID NO: 7491 - DNA, 20 bp, synthetic construct
  misc_feature 1..20: note = Description of Artificial Sequence: Synthetic oligonucleotide
  misc_feature 1..20: note = Target: ANGPTL4; (-) strand; PAM type: NRG; PAM sequence: CAG
  source 1..20: mol_type = other DNA
ctcccaagtagctgggatta

SEQ ID NO: 7492 - DNA, 20 bp, synthetic construct
  misc_feature 1..20: note = Description of Artificial Sequence: Synthetic oligonucleotide
  misc_feature 1..20: note = Target: ANGPTL4; (-) strand; PAM type: NRG; PAM sequence: GGG
  source 1..20: mol_type = other DNA
cctcagcctcccaagtagct

SEQ ID NO: 7493 - DNA, 20 bp, synthetic construct
  misc_feature 1..20: note = Description of Artificial Sequence: Synthetic oligonucleotide
  misc_feature 1..20: note = Target: ANGPTL4; (-) strand; PAM type: NRG; PAM sequence: TGG
  source 1..20: mol_type = other DNA
gcctcagcctcccaagtagc

SEQ ID NO: 7494 - DNA, 20 bp, synthetic construct
  misc_feature 1..20: note = Description of Artificial Sequence: Synthetic oligonucleotide
  misc_feature 1..20: note = Target: ANGPTL4; (-) strand; PAM type: NRG; PAM sequence: TAG
  source 1..20: mol_type = other DNA
tcctgcctcagcctcccaag

SEQ ID NO: 7495 - DNA, 20 bp, synthetic construct
  misc_feature 1..20: note = Description of Artificial Sequence: Synthetic oligonucleotide
  misc_feature 1..20: note = Target: ANGPTL4; (-) strand; PAM type: NRG; PAM sequence: AAG
  source 1..20: mol_type = other DNA
ttctcctgcctcagcctccc

SEQ ID NO: 7496 - DNA, 20 bp, synthetic construct
  misc_feature 1..20: note = Description of Artificial Sequence: Synthetic oligonucleotide
  misc_feature 1..20: note = Target: ANGPTL4; (-) strand; PAM type: NRG; PAM sequence: CAG
  source 1..20: mol_type = other DNA
ttcaagagattctcctgcct

SEQ ID NO: 7497 - DNA, 20 bp, synthetic construct
  misc_feature 1..20: note = Description of Artificial Sequence: Synthetic oligonucleotide
  misc_feature 1..20: note = Target: ANGPTL4; (-) strand; PAM type: NRG; PAM sequence: GAG
  source 1..20: mol_type = other DNA
cctctgcctcccgggttcaa

SEQ ID NO: 7498 - DNA, 20 bp, synthetic construct
  misc_feature 1..20: note = Description of Artificial Sequence: Synthetic oligonucleotide
  misc_feature 1..20: note = Target: ANGPTL4; (-) strand; PAM type: NRG; PAM sequence: AAG
  source 1..20: mol_type = other DNA
aacctctgcctcccgggttc

SEQ ID NO: 7499 - DNA, 20 bp, synthetic construct
  misc_feature 1..20: note = Description of Artificial Sequence: Synthetic oligonucleotide
  misc_feature 1..20: note = Target: ANGPTL4; (-) strand; PAM type: NRG; PAM sequence: GGG
  source 1..20: mol_type = other DNA
cactgcaacctctgcctccc

SEQ ID NO: 7500 - DNA, 20 bp, synthetic construct
  misc_feature 1..20: note = Description of Artificial Sequence: Synthetic oligonucleotide
  misc_feature 1..20: note = Target: ANGPTL4; (-) strand; PAM type: NRG; PAM sequence: CGG
  source 1..20: mol_type = other DNA
tcactgcaacctctgcctcc

SEQ ID NO: 7501 - DNA, 20 bp, synthetic construct
  misc_feature 1..20: note = Description of Artificial Sequence: Synthetic oligonucleotide
  misc_feature 1..20: note = Target: ANGPTL4; (-) strand; PAM type: NRG; PAM sequence: CGG
  source 1..20: mol_type = other DNA
ggagtgcagtgctgcgatct

SEQ ID NO: 7502 - DNA, 20 bp, synthetic construct
  misc_feature 1..20: note = Description of Artificial Sequence: Synthetic oligonucleotide
  misc_feature 1..20: note = Target: ANGPTL4; (-) strand; PAM type: NRG; PAM sequence: CAG
  source 1..20: mol_type = other DNA
ctgttgcccaggctggagtg

SEQ ID NO: 7503 - DNA, 20 bp, synthetic construct
  misc_feature 1..20: note = Description of Artificial Sequence: Synthetic oligonucleotide
  misc_feature 1..20: note = Target: ANGPTL4; (-) strand; PAM type: NRG; PAM sequence: GAG
  source 1..20: mol_type = other DNA
tcactctgttgcccaggctg

SEQ ID NO: 7504 - DNA, 20 bp, synthetic construct
  misc_feature 1..20: note = Description of Artificial Sequence: Synthetic oligonucleotide
  misc_feature 1..20: note = Target: ANGPTL4; (-) strand; PAM type: NRG; PAM sequence: TGG
  source 1..20: mol_type = other DNA
tctcactctgttgcccaggc

SEQ ID NO: 7505 - DNA, 20 bp, synthetic construct
  misc_feature 1..20: note = Description of Artificial Sequence: Synthetic oligonucleotide
  misc_feature 1..20: note = Target: ANGPTL4; (-) strand; PAM type: NRG; PAM sequence: AGG
  source 1..20: mol_type = other DNA
ggagtctcactctgttgccc

SEQ ID NO: 7506 - DNA, 20 bp, synthetic construct
  misc_feature 1..20: note = Description of Artificial Sequence: Synthetic oligonucleotide
  misc_feature 1..20: note = Target: ANGPTL4; (-) strand; PAM type: NRG; PAM sequence: CAG
  source 1..20: mol_type = other DNA
aggagtctcactctgttgcc

SEQ ID NO: 7507 - DNA, 20 bp, synthetic construct
  misc_feature 1..20: note = Description of Artificial Sequence: Synthetic oligonucleotide
  misc_feature 1..20: note = Target: ANGPTL4; (-) strand; PAM type: NRG; PAM sequence: GAG
  source 1..20: mol_type = other DNA
atcgctattatttttttgag

SEQ ID NO: 7508 - DNA, 20 bp, synthetic construct
  misc_feature 1..20: note = Description of Artificial Sequence: Synthetic oligonucleotide
  misc_feature 1..20: note = Target: ANGPTL4; (-) strand; PAM type: NRG; PAM sequence: AGG
  source 1..20: mol_type = other DNA
ttatcgctattatttttttg

SEQ ID NO: 7509 - DNA, 20 bp, synthetic construct
  misc_feature 1..20: note = Description of Artificial Sequence: Synthetic oligonucleotide
  misc_feature 1..20: note = Target: ANGPTL4; (-) strand; PAM type: NRG; PAM sequence: GAG
  source 1..20: mol_type = other DNA
tttatcgctattattttttt

SEQ ID NO: 7510 - DNA, 20 bp, synthetic construct
  misc_feature 1..20: note = Description of Artificial Sequence: Synthetic oligonucleotide
  misc_feature 1..20: note = Target: ANGPTL4; (-) strand; PAM type: NRG; PAM sequence: TGG
  source 1..20: mol_type = other DNA
caagcgtgagtcaccgcacc

SEQ ID NO: 7511 - DNA, 20 bp, synthetic construct
  misc_feature 1..20: note = Description of Artificial Sequence: Synthetic oligonucleotide
  misc_feature 1..20: note = Target: ANGPTL4; (-) strand; PAM type: NRG; PAM sequence: GAG
  source 1..20: mol_type = other DNA
agtgctgggactacaagcgt

SEQ ID NO: 7512 - DNA, 20 bp, synthetic construct
  misc_feature 1..20: note = Description of Artificial Sequence: Synthetic oligonucleotide
  misc_feature 1..20: note = Target: ANGPTL4; (-) strand; PAM type: NRG; PAM sequence: AAG
  source 1..20: mol_type = other DNA
tcccaaagtgctgggactac

SEQ ID NO: 7513 - DNA, 20 bp, synthetic construct
  misc_feature 1..20: note = Description of Artificial Sequence: Synthetic oligonucleotide
  misc_feature 1..20: note = Target: ANGPTL4; (-) strand; PAM type: NRG; PAM sequence: GGG
  source 1..20: mol_type = other DNA
cctcgccctcccaaagtgct

SEQ ID NO: 7514 - DNA, 20 bp, synthetic construct
  misc_feature 1..20: note = Description of Artificial Sequence: Synthetic oligonucleotide
  misc_feature 1..20: note = Target: ANGPTL4; (-) strand; PAM type: NRG; PAM sequence: TGG
  source 1..20: mol_type = other DNA
gcctcgccctcccaaagtgc

SEQ ID NO: 7515 - DNA, 20 bp, synthetic construct
  misc_feature 1..20: note = Description of Artificial Sequence: Synthetic oligonucleotide
  misc_feature 1..20: note = Target: ANGPTL4; (-) strand; PAM type: NRG; PAM sequence: AAG
  source 1..20: mol_type = other DNA
ccactggcctcgccctccca

SEQ ID NO: 7516 - DNA, 20 bp, synthetic construct
  misc_feature 1..20: note = Description of Artificial Sequence: Synthetic oligonucleotide
  misc_feature 1..20: note = Target: ANGPTL4; (-) strand; PAM type: NRG; PAM sequence: TGG
  source 1..20: mol_type = other DNA
cctgacctcaggtgatccac

SEQ ID NO: 7517 - DNA, 20 bp, synthetic construct
  misc_feature 1..20: note = Description of Artificial Sequence: Synthetic oligonucleotide
  misc_feature 1..20: note = Target: ANGPTL4; (-) strand; PAM type: NRG; PAM sequence: AGG
  source 1..20: mol_type = other DNA
ggtcttgaactcctgacctc

SEQ ID NO: 7518 - DNA, 20 bp, synthetic construct
  misc_feature 1..20: note = Description of Artificial Sequence: Synthetic oligonucleotide
  misc_feature 1..20: note = Target: ANGPTL4; (-) strand; PAM type: NRG; PAM sequence: CAG
  source 1..20: mol_type = other DNA
tggtcttgaactcctgacct

SEQ ID NO: 7519 - DNA, 20 bp, synthetic construct
  misc_feature 1..20: note = Description of Artificial Sequence: Synthetic oligonucleotide
  misc_feature 1..20: note = Target: ANGPTL4; (-) strand; PAM type: NRG; PAM sequence: TGG
  source 1..20: mol_type = other DNA
tttcactgtgttggtcaggc

SEQ ID NO: 7520 - DNA, 20 bp, synthetic construct
  misc_feature 1..20: note = Description of Artificial Sequence: Synthetic oligonucleotide
  misc_feature 1..20: note = Target: ANGPTL4; (-) strand; PAM type: NRG; PAM sequence: AGG
  source 1..20: mol_type = other DNA
ggggtttcactgtgttggtc

SEQ ID NO: 7521 - DNA, 20 bp, synthetic construct
  misc_feature 1..20: note = Description of Artificial Sequence: Synthetic oligonucleotide
  misc_feature 1..20: note = Target: ANGPTL4; (-) strand; PAM type: NRG; PAM sequence: CAG
  source 1..20: mol_type = other DNA
cggggtttcactgtgttggt

SEQ ID NO: 7522 - DNA, 20 bp, synthetic construct
  misc_feature 1..20: note = Description of Artificial Sequence: Synthetic oligonucleotide
  misc_feature 1..20: note = Target: ANGPTL4; (-) strand; PAM type: NRG; PAM sequence: TGG
  source 1..20: mol_type = other DNA
gagacggggtttcactgtgt

SEQ ID NO: 7523 - DNA, 20 bp, synthetic construct
  misc_feature 1..20: note = Description of Artificial Sequence: Synthetic oligonucleotide
  misc_feature 1..20: note = Target: ANGPTL4; (-) strand; PAM type: NRG; PAM sequence: GGG
  source 1..20: mol_type = other DNA
ttgtatttttagtagagacg

SEQ ID NO: 7524 - DNA, 20 bp, synthetic construct
  misc_feature 1..20: note = Description of Artificial Sequence: Synthetic oligonucleotide
  misc_feature 1..20: note = Target: ANGPTL4; (-) strand; PAM type: NRG; PAM sequence: GGG
  source 1..20: mol_type = other DNA
tttgtatttttagtagagac

SEQ ID NO: 7525 - DNA, 20 bp, synthetic construct
  misc_feature 1..20: note = Description of Artificial Sequence: Synthetic oligonucleotide
  misc_feature 1..20: note = Target: ANGPTL4; (-) strand; PAM type: NRG; PAM sequence: CGG
  source 1..20: mol_type = other DNA
ttttgtatttttagtagaga

SEQ ID NO: 7526 - DNA, 20 bp, synthetic construct
  misc_feature 1..20: note = Description of Artificial Sequence: Synthetic oligonucleotide
  misc_feature 1..20: note = Target: ANGPTL4; (-) strand; PAM type: NRG; PAM sequence: GAG
  source 1..20: mol_type = other DNA
taatttttgtatttttagta

SEQ ID NO: 7527 - DNA, 20 bp, synthetic construct
  misc_feature 1..20: note = Description of Artificial Sequence: Synthetic oligonucleotide
  misc_feature 1..20: note = Target: ANGPTL4; (-) strand; PAM type: NRG; PAM sequence: TAG
  source 1..20: mol_type = other DNA
gctaatttttgtatttttag

SEQ ID NO: 7528 - DNA, 20 bp, synthetic construct
  misc_feature 1..20: note = Description of Artificial Sequence: Synthetic oligonucleotide
  misc_feature 1..20: note = Target: ANGPTL4; (-) strand; PAM type: NRG; PAM sequence: TAG
  source 1..20: mol_type = other DNA
ccagctaatttttgtatttt

SEQ ID NO: 7529 - DNA, 20 bp, synthetic construct
  misc_feature 1..20: note = Description of Artificial Sequence: Synthetic oligonucleotide
  misc_feature 1..20: note = Target: ANGPTL4; (-) strand; PAM type: NRG; PAM sequence: CAG
  source 1..20: mol_type = other DNA
caggcgcccaccaccacacc

SEQ ID NO: 7530 - DNA, 20 bp, synthetic construct
  misc_feature 1..20: note = Description of Artificial Sequence: Synthetic oligonucleotide
  misc_feature 1..20: note = Target: ANGPTL4; (-) strand; PAM type: NRG; PAM sequence: AGG
  source 1..20: mol_type = other DNA
tccccagtagctgggattac

SEQ ID NO: 7531 - DNA, 20 bp, synthetic construct
  misc_feature 1..20: note = Description of Artificial Sequence: Synthetic oligonucleotide
  misc_feature 1..20: note = Target: ANGPTL4; (-) strand; PAM type: NRG; PAM sequence: CAG
  source 1..20: mol_type = other DNA
ctccccagtagctgggatta

SEQ ID NO: 7532 - DNA, 20 bp, synthetic construct
  misc_feature 1..20: note = Description of Artificial Sequence: Synthetic oligonucleotide
  misc_feature 1..20: note = Target: ANGPTL4; (-) strand; PAM type: NRG; PAM sequence: GGG
  source 1..20: mol_type = other DNA
cctcagcctccccagtagct

SEQ ID NO: 7533 - DNA, 20 bp, synthetic construct
  misc_feature 1..20: note = Description of Artificial Sequence: Synthetic oligonucleotide
  misc_feature 1..20: note = Target: ANGPTL4; (-) strand; PAM type: NRG; PAM sequence: TGG
  source 1..20: mol_type = other DNA
gcctcagcctccccagtagc

SEQ ID NO: 7534 - DNA, 20 bp, synthetic construct
  misc_feature 1..20: note = Description of Artificial Sequence: Synthetic oligonucleotide
  misc_feature 1..20: note = Target: ANGPTL4; (-) strand; PAM type: NRG; PAM sequence: TAG
  source 1..20: mol_type = other DNA
tcctgcctcagcctccccag

SEQ ID NO: 7535 - DNA, 20 bp, synthetic construct
  misc_feature 1..20: note = Description of Artificial Sequence: Synthetic oligonucleotide
  misc_feature 1..20: note = Target: ANGPTL4; (-) strand; PAM type: NRG; PAM sequence: CAG
  source 1..20: mol_type = other DNA
ttctcctgcctcagcctccc

SEQ ID NO: 7536 - DNA, 20 bp, synthetic construct
  misc_feature 1..20: note = Description of Artificial Sequence: Synthetic oligonucleotide
  misc_feature 1..20: note = Target: ANGPTL4; (-) strand; PAM type: NRG; PAM sequence: CAG
  source 1..20: mol_type = other DNA
ttcaagaggttctcctgcct

SEQ ID NO: 7537 - DNA, 20 bp, synthetic construct
  misc_feature 1..20: note = Description of Artificial Sequence: Synthetic oligonucleotide
  misc_feature 1..20: note = Target: ANGPTL4; (-) strand; PAM type: NRG; PAM sequence: AGG
  source 1..20: mol_type = other DNA
ctccgcctcccgggttcaag

SEQ ID NO: 7538 - DNA, 20 bp, synthetic construct
  misc_feature 1..20: note = Description of Artificial Sequence: Synthetic oligonucleotide
  misc_feature 1..20: note = Target: ANGPTL4; (-) strand; PAM type: NRG; PAM sequence: GAG
  source 1..20: mol_type = other DNA
cctccgcctcccgggttcaa

SEQ ID NO: 7539 - DNA, 20 bp, synthetic construct
  misc_feature 1..20: note = Description of Artificial Sequence: Synthetic oligonucleotide
  misc_feature 1..20: note = Target: ANGPTL4; (-) strand; PAM type: NRG; PAM sequence: AAG
  source 1..20: mol_type = other DNA
aacctccgcctcccgggttc

SEQ ID NO: 7540 - DNA, 20 bp, synthetic construct
  misc_feature 1..20: note = Description of Artificial Sequence: Synthetic oligonucleotide
  misc_feature 1..20: note = Target: ANGPTL4; (-) strand; PAM type: NRG; PAM sequence: GGG
  source 1..20: mol_type = other DNA
cactgcaacctccgcctccc

SEQ ID NO: 7541 - DNA, 20 bp, synthetic construct
  misc_feature 1..20: note = Description of Artificial Sequence: Synthetic oligonucleotide
  misc_feature 1..20: note = Target: ANGPTL4; (-) strand; PAM type: NRG; PAM sequence: CGG
  source 1..20: mol_type = other DNA
tcactgcaacctccgcctcc

SEQ ID NO: 7542 - DNA, 20 bp, synthetic construct
  misc_feature 1..20: note = Description of Artificial Sequence: Synthetic oligonucleotide
  misc_feature 1..20: note = Target: ANGPTL4; (-) strand; PAM type: NRG; PAM sequence: CGG
  source 1..20: mol_type = other DNA
ggagtgcaatggcatgatcc

SEQ ID NO: 7543 - DNA, 20 bp, synthetic construct
  misc_feature 1..20: note = Description of Artificial Sequence: Synthetic oligonucleotide
  misc_feature 1..20: note = Target: ANGPTL4; (-) strand; PAM type: NRG; PAM sequence: TGG
  source 1..20: mol_type = other DNA
tcgcccaggctggagtgcaa

SEQ ID NO: 7544 - DNA, 20 bp, synthetic construct
  misc_feature 1..20: note = Description of Artificial Sequence: Synthetic oligonucleotide
  misc_feature 1..20: note = Target: ANGPTL4; (-) strand; PAM type: NRG; PAM sequence: GAG
  source 1..20: mol_type = other DNA
gagctctgtcgcccaggctg

SEQ ID NO: 7545 - DNA, 20 bp, synthetic construct
  misc_feature 1..20: note = Description of Artificial Sequence: Synthetic oligonucleotide
  misc_feature 1..20: note = Target: ANGPTL4; (-) strand; PAM type: NRG; PAM sequence: TGG
  source 1..20: mol_type = other DNA
tcgagctctgtcgcccaggc

SEQ ID NO: 7546 - DNA, 20 bp, synthetic construct
  misc_feature 1..20: note = Description of Artificial Sequence: Synthetic oligonucleotide
  misc_feature 1..20: note = Target: ANGPTL4; (-) strand; PAM type: NRG; PAM sequence: AGG
  source 1..20: mol_type = other DNA
ggagtcgagctctgtcgccc

SEQ ID NO: 7547 - DNA, 20 bp, synthetic construct
  misc_feature 1..20: note = Description of Artificial Sequence: Synthetic oligonucleotide
  misc_feature 1..20: note = Target: ANGPTL4; (-) strand; PAM type: NRG; PAM sequence: CAG
  source 1..20: mol_type = other DNA
tggagtcgagctctgtcgcc

SEQ ID NO: 7548 - DNA, 20 bp, synthetic construct
  misc_feature 1..20: note = Description of Artificial Sequence: Synthetic oligonucleotide
  misc_feature 1..20: note = Target: ANGPTL4; (-) strand; PAM type: NRG; PAM sequence: GAG
  source 1..20: mol_type = other DNA
tattattttgagatggagtc

SEQ ID NO: 7549 - DNA, 20 bp, synthetic construct
  misc_feature 1..20: note = Description of Artificial Sequence: Synthetic oligonucleotide
  misc_feature 1..20: note = Target: ANGPTL4; (-) strand; PAM type: NRG; PAM sequence: GAG
  source 1..20: mol_type = other DNA
attattattattttgagatg

SEQ ID NO: 7550 - DNA, 20 bp, synthetic construct
  misc_feature 1..20: note = Description of Artificial Sequence: Synthetic oligonucleotide
  misc_feature 1..20: note = Target: ANGPTL4; (-) strand; PAM type: NRG; PAM sequence: TGG
  source 1..20: mol_type = other DNA
ttattattattattttgaga

SEQ ID NO: 7551 - DNA, 20 bp, synthetic construct
  misc_feature 1..20: note = Description of Artificial Sequence: Synthetic oligonucleotide
  misc_feature 1..20: note = Target: ANGPTL4; (-) strand; PAM type: NRG; PAM sequence: GAG
  source 1..20: mol_type = other DNA
tttattattattattatttt

SEQ ID NO: 7552 - DNA, 20 bp, synthetic construct
  misc_feature 1..20: note = Description of Artificial Sequence: Synthetic oligonucleotide
  misc_feature 1..20: note = Target: ANGPTL4; (-) strand; PAM type: NRG; PAM sequence: TGG
  source 1..20: mol_type = other DNA
caagtagctgccaccacacc

SEQ ID NO: 7553 - DNA, 20 bp, synthetic construct
  misc_feature 1..20: note = Description of Artificial Sequence: Synthetic oligonucleotide
  misc_feature 1..20: note = Target: ANGPTL4; (-) strand; PAM type: NRG; PAM sequence: TAG
  source 1..20: mol_type = other DNA
ttgtgtctcagcctcccaag

SEQ ID NO: 7554 - DNA, 20 bp, synthetic construct
  misc_feature 1..20: note = Description of Artificial Sequence: Synthetic oligonucleotide
  misc_feature 1..20: note = Target: ANGPTL4; (-) strand; PAM type: NRG; PAM sequence: AAG
  source 1..20: mol_type = other DNA
ttcttgtgtctcagcctccc

SEQ ID NO: 7555 - DNA, 20 bp, synthetic construct
  misc_feature 1..20: note = Description of Artificial Sequence: Synthetic oligonucleotide
  misc_feature 1..20: note = Target: ANGPTL4; (-) strand; PAM type: NRG; PAM sequence: CAG
  source 1..20: mol_type = other DNA
ctcaagtgattcttgtgtct

SEQ ID NO: 7556 - DNA, 20 bp, synthetic construct
  misc_feature 1..20: note = Description of Artificial Sequence: Synthetic oligonucleotide
  misc_feature 1..20: note = Target: ANGPTL4; (-) strand; PAM type: NRG; PAM sequence: AAG
  source 1..20: mol_type = other DNA
aacctctgcctcccagactc

SEQ ID NO: 7557 - DNA, 20 bp, synthetic construct
  misc_feature 1..20: note = Description of Artificial Sequence: Synthetic oligonucleotide
  misc_feature 1..20: note = Target: ANGPTL4; (-) strand; PAM type: NRG; PAM sequence: CAG
  source 1..20: mol_type = other DNA
tcactgcaacctctgcctcc

SEQ ID NO: 7558 - DNA, 20 bp, synthetic construct
  misc_feature 1..20: note = Description of Artificial Sequence: Synthetic oligonucleotide
  misc_feature 1..20: note = Target: ANGPTL4; (-) strand; PAM type: NRG; PAM sequence: TGG
  source 1..20: mol_type = other DNA
ggagtgcagtggcgcaatct

SEQ ID NO: 7559 - DNA, 20 bp, synthetic construct
  misc_feature 1..20: note = Description of Artificial Sequence: Synthetic oligonucleotide
  misc_feature 1..20: note = Target: ANGPTL4; (-) strand; PAM type: NRG; PAM sequence: TGG
  source 1..20: mol_type = other DNA
tcacccaggttggagtgcag

SEQ ID NO: 7560 - DNA, 20 bp, synthetic construct
  misc_feature 1..20: note = Description of Artificial Sequence: Synthetic oligonucleotide
  misc_feature 1..20: note = Target: ANGPTL4; (-) strand; PAM type: NRG; PAM sequence: CAG
  source 1..20: mol_type = other DNA
ctgtcacccaggttggagtg

SEQ ID NO: 7561 - DNA, 20 bp, synthetic construct
  misc_feature 1..20: note = Description of Artificial Sequence: Synthetic oligonucleotide
  misc_feature 1..20: note = Target: ANGPTL4; (-) strand; PAM type: NRG; PAM sequence: GAG
  source 1..20: mol_type = other DNA
tcgctctgtcacccaggttg

SEQ ID NO: 7562 - DNA, 20 bp, synthetic construct
  misc_feature 1..20: note = Description of Artificial Sequence: Synthetic oligonucleotide
  misc_feature 1..20: note = Target: ANGPTL4; (-) strand; PAM type: NRG; PAM sequence: TGG
  source 1..20: mol_type = other DNA
tctcgctctgtcacccaggt

SEQ ID NO: 7563 - DNA, 20 bp, synthetic construct
  misc_feature 1..20: note = Description of Artificial Sequence: Synthetic oligonucleotide
  misc_feature 1..20: note = Target: ANGPTL4; (-) strand; PAM type: NRG; PAM sequence: AGG
  source 1..20: mol_type = other DNA
agagtctcgctctgtcaccc

SEQ ID NO: 7564 - DNA, 20 bp, synthetic construct
  misc_feature 1..20: note = Description of Artificial Sequence: Synthetic oligonucleotide
  misc_feature 1..20: note = Target: ANGPTL4; (-) strand; PAM type: NRG; PAM sequence: CAG
  source 1..20: mol_type = other DNA
cagagtctcgctctgtcacc

SEQ ID NO: 7565 - DNA, 20 bp, synthetic construct
  misc_feature 1..20: note = Description of Artificial Sequence: Synthetic oligonucleotide
  misc_feature 1..20: note = Target: ANGPTL4; (-) strand; PAM type: NRG; PAM sequence: GAG
  source 1..20: mol_type = other DNA
attttttattttttcagaca

SEQ ID NO: 7566 - DNA, 20 bp, synthetic construct
  misc_feature 1..20: note = Description of Artificial Sequence: Synthetic oligonucleotide
  misc_feature 1..20: note = Target: ANGPTL4; (-) strand; PAM type: NRG; PAM sequence: CAG
  source 1..20: mol_type = other DNA
ttattttttattttttcaga

SEQ ID NO: 7567 - DNA, 20 bp, synthetic construct
  misc_feature 1..20: note = Description of Artificial Sequence: Synthetic oligonucleotide
  misc_feature 1..20: note = Target: ANGPTL4; (-) strand; PAM type: NRG; PAM sequence: CAG
  source 1..20: mol_type = other DNA
tggcttattttttatttttt

SEQ ID NO: 7568 - DNA, 20 bp, synthetic construct
  misc_feature 1..20: note = Description of Artificial Sequence: Synthetic oligonucleotide
  misc_feature 1..20: note = Target: ANGPTL4; (-) strand; PAM type: NRG; PAM sequence: TGG
  source 1..20: mol_type = other DNA
cagtcatgcagctctatgcc

SEQ ID NO: 7569 - DNA, 20 bp, synthetic construct
  misc_feature 1..20: note = Description of Artificial Sequence: Synthetic oligonucleotide
  misc_feature 1..20: note = Target: ANGPTL4; (-) strand; PAM type: NRG; PAM sequence: CAG
  source 1..20: mol_type = other DNA
tagctgggactacagtcatg

SEQ ID NO: 7570 - DNA, 20 bp, synthetic construct
  misc_feature 1..20: note = Description of Artificial Sequence: Synthetic oligonucleotide
  misc_feature 1..20: note = Target: ANGPTL4; (-) strand; PAM type: NRG; PAM sequence: CAG
  source 1..20: mol_type = other DNA
ctcctgtgtagctgggacta

SEQ ID NO: 7571 - DNA, 20 bp, synthetic construct
  misc_feature 1..20: note = Description of Artificial Sequence: Synthetic oligonucleotide
  misc_feature 1..20: note = Target: ANGPTL4; (-) strand; PAM type: NRG; PAM sequence: GGG
  source 1..20: mol_type = other DNA
tttcagcctcctgtgtagct

SEQ ID NO: 7572 - DNA, 20 bp, synthetic construct
  misc_feature 1..20: note = Description of Artificial Sequence: Synthetic oligonucleotide
  misc_feature 1..20: note = Target: ANGPTL4; (-) strand; PAM type: NRG; PAM sequence: TGG
  source 1..20: mol_type = other DNA
ttttcagcctcctgtgtagc

SEQ ID NO: 7573 - DNA, 20 bp, synthetic construct
  misc_feature 1..20: note = Description of Artificial Sequence: Synthetic oligonucleotide
  misc_feature 1..20: note = Target: ANGPTL4; (-) strand; PAM type: NRG; PAM sequence: TAG
  source 1..20: mol_type = other DNA
cctgttttcagcctcctgtg

SEQ ID NO: 7574 - DNA, 20 bp, synthetic construct
  misc_feature 1..20: note = Description of Artificial Sequence: Synthetic oligonucleotide
  misc_feature 1..20: note = Target: ANGPTL4; (-) strand; PAM type: NRG; PAM sequence: CAG
  source 1..20: mol_type = other DNA
tcaggcgatcctcctgtttt

SEQ ID NO: 7575 - DNA, 20 bp, synthetic construct
  misc_feature 1..20: note = Description of Artificial Sequence: Synthetic oligonucleotide
  misc_feature 1..20: note = Target: ANGPTL4; (-) strand; PAM type: NRG; PAM sequence: AGG
  source 1..20: mol_type = other DNA
agcctccaactcctggggtc

SEQ ID NO: 7576 - DNA, 20 bp, synthetic construct
  misc_feature 1..20: note = Description of Artificial Sequence: Synthetic oligonucleotide
  misc_feature 1..20: note = Target: ANGPTL4; (-) strand; PAM type: NRG; PAM sequence: CAG
  source 1..20: mol_type = other DNA
cagcctccaactcctggggt

SEQ ID NO: 7577 - DNA, 20 bp, synthetic construct
  misc_feature 1..20: note = Description of Artificial Sequence: Synthetic oligonucleotide
  misc_feature 1..20: note = Target: ANGPTL4; (-) strand; PAM type: NRG; PAM sequence: GGG
  source 1..20: mol_type = other DNA
actgcagcctccaactcctg

SEQ ID NO: 7578 - DNA, 20 bp, synthetic construct
  misc_feature 1..20: note = Description of Artificial Sequence: Synthetic oligonucleotide
  misc_feature 1..20: note = Target: ANGPTL4; (-) strand; PAM type: NRG; PAM sequence: GGG
  source 1..20: mol_type = other DNA
cactgcagcctccaactcct

SEQ ID NO: 7579 - DNA, 20 bp, synthetic construct
  misc_feature 1..20: note = Description of Artificial Sequence: Synthetic oligonucleotide
  misc_feature 1..20: note = Target: ANGPTL4; (-) strand; PAM type: NRG; PAM sequence: TGG
  source 1..20: mol_type = other DNA
tcactgcagcctccaactcc

SEQ ID NO: 7580 - DNA, 20 bp, synthetic construct
  misc_feature 1..20: note = Description of Artificial Sequence: Synthetic oligonucleotide
  misc_feature 1..20: note = Target: ANGPTL4; (-) strand; PAM type: NRG; PAM sequence: CAG
  source 1..20: mol_type = other DNA
ggtgctgtcacagctcactg

SEQ ID NO: 7581 - DNA, 20 bp, synthetic construct
  misc_feature 1..20: note = Description of Artificial Sequence: Synthetic oligonucleotide
  misc_feature 1..20: note = Target: ANGPTL4; (-) strand; PAM type: NRG; PAM sequence: CAG
  source 1..20: mol_type = other DNA
ggagtgcagtggtgctgtca

SEQ ID NO: 7582 - DNA, 20 bp, synthetic construct
  misc_feature 1..20: note = Description of Artificial Sequence: Synthetic oligonucleotide
  misc_feature 1..20: note = Target: ANGPTL4; (-) strand; PAM type: NRG; PAM sequence: TGG
  source 1..20: mol_type = other DNA
tcgcccaggctggagtgcag

SEQ ID NO: 7583 - DNA, 20 bp, synthetic construct
  misc_feature 1..20: note = Description of Artificial Sequence: Synthetic oligonucleotide
  misc_feature 1..20: note = Target: ANGPTL4; (-) strand; PAM type: NRG; PAM sequence: CAG
  source 1..20: mol_type = other DNA
ctctcgcccaggctggagtg

SEQ ID NO: 7584 - DNA, 20 bp, synthetic construct
  misc_feature 1..20: note = Description of Artificial Sequence: Synthetic oligonucleotide
  misc_feature 1..20: note = Target: ANGPTL4; (-) strand; PAM type: NRG; PAM sequence: GAG
  source 1..20: mol_type = other DNA
tcgttctctcgcccaggctg

SEQ ID NO: 7585 - DNA, 20 bp, synthetic construct
  misc_feature 1..20: note = Description of Artificial Sequence: Synthetic oligonucleotide
  misc_feature 1..20: note = Target: ANGPTL4; (-) strand; PAM type: NRG; PAM sequence: TGG
  source 1..20: mol_type = other DNA
tctcgttctctcgcccaggc

SEQ ID NO: 7586 - DNA, 20 bp, synthetic construct
  misc_feature 1..20: note = Description of Artificial Sequence: Synthetic oligonucleotide
  misc_feature 1..20: note = Target: ANGPTL4; (-) strand; PAM type: NRG; PAM sequence: AGG
  source 1..20: mol_type = other DNA
ggggtctcgttctctcgccc

SEQ ID NO: 7587 - DNA, 20 bp, synthetic construct
  misc_feature 1..20: note = Description of Artificial Sequence: Synthetic oligonucleotide
  misc_feature 1..20: note = Target: ANGPTL4; (-) strand; PAM type: NRG; PAM sequence: CAG
  source 1..20: mol_type = other DNA
cggggtctcgttctctcgcc

SEQ ID NO: 7588 - DNA, 20 bp, synthetic construct
  misc_feature 1..20: note = Description of Artificial Sequence: Synthetic oligonucleotide
  misc_feature 1..20: note = Target: ANGPTL4; (-) strand; PAM type: NRG; PAM sequence: GGG
  source 1..20: mol_type = other DNA
tcttttttttcccaatgacg

SEQ ID NO: 7589 - DNA, 20 bp, synthetic construct
  misc_feature 1..20: note = Description of Artificial Sequence: Synthetic oligonucleotide
  misc_feature 1..20: note = Target: ANGPTL4; (-) strand; PAM type: NRG; PAM sequence: GGG
  source 1..20: mol_type = other DNA
ttcttttttttcccaatgac

SEQ ID NO: 7590 - DNA, 20 bp, synthetic construct
  misc_feature 1..20: note = Description of Artificial Sequence: Synthetic oligonucleotide
  misc_feature 1..20: note = Target: ANGPTL4; (-) strand; PAM type: NRG; PAM sequence: CGG
  source 1..20: mol_type = other DNA
tttcttttttttcccaatga

SEQ ID NO: 7591 - DNA, 20 bp, synthetic construct
  misc_feature 1..20: note = Description of Artificial Sequence: Synthetic oligonucleotide
  misc_feature 1..20: note = Target: ANGPTL4; (-) strand; PAM type: NRG; PAM sequence: GAG
  source 1..20: mol_type = other DNA
tccgctgaggccaggcaagg

SEQ ID NO: 7592 - DNA, 20 bp, synthetic construct
  misc_feature 1..20: note = Description of Artificial Sequence: Synthetic oligonucleotide
  misc_feature 1..20: note = Target: ANGPTL4; (-) strand; PAM type: NRG; PAM sequence: GGG
  source 1..20: mol_type = other DNA
catccgctgaggccaggcaa

SEQ ID NO: 7593 - DNA, 20 bp, synthetic construct
  misc_feature 1..20: note = Description of Artificial Sequence: Synthetic oligonucleotide
  misc_feature 1..20: note = Target: ANGPTL4; (-) strand; PAM type: NRG; PAM sequence: AGG
  source 1..20: mol_type = other DNA
ccatccgctgaggccaggca

SEQ ID NO: 7594 - DNA, 20 bp, synthetic construct
  misc_feature 1..20: note = Description of Artificial Sequence: Synthetic oligonucleotide
  misc_feature 1..20: note = Target: ANGPTL4; (-) strand; PAM type: NRG; PAM sequence: AAG
  source 1..20: mol_type = other DNA
tccatccgctgaggccaggc

SEQ ID NO: 7595 - DNA, 20 bp, synthetic construct
  misc_feature 1..20: note = Description of Artificial Sequence: Synthetic oligonucleotide
  misc_feature 1..20: note = Target: ANGPTL4; (-) strand; PAM type: NRG; PAM sequence: AGG
  source 1..20: mol_type = other DNA
aatctccatccgctgaggcc

SEQ ID NO: 7596 - DNA, 20 bp, synthetic construct
  misc_feature 1..20: note = Description of Artificial Sequence: Synthetic oligonucleotide
  misc_feature 1..20: note = Target: ANGPTL4; (-) strand; PAM type: NRG; PAM sequence: CAG
  source 1..20: mol_type = other DNA
aaatctccatccgctgaggc

SEQ ID NO: 7597 - DNA, 20 bp, synthetic construct
  misc_feature 1..20: note = Description of Artificial Sequence: Synthetic oligonucleotide
  misc_feature 1..20: note = Target: ANGPTL4; (-) strand; PAM type: NRG; PAM sequence: AGG
  source 1..20: mol_type = other DNA
ttccaaatctccatccgctg

SEQ ID NO: 7598 - DNA, 20 bp, synthetic construct
  misc_feature 1..20: note = Description of Artificial Sequence: Synthetic oligonucleotide
  misc_feature 1..20: note = Target: ANGPTL4; (-) strand; PAM type: NRG; PAM sequence: GAG
  source 1..20: mol_type = other DNA
cttccaaatctccatccgct

SEQ ID NO: 7599 - DNA, 20 bp, synthetic construct
  misc_feature 1..20: note = Description of Artificial Sequence: Synthetic oligonucleotide
  misc_feature 1..20: note = Target: ANGPTL4; (-) strand; PAM type: NRG; PAM sequence: CAG
  source 1..20: mol_type = other DNA
tgaaaaccttggtgaggacc

SEQ ID NO: 7600 - DNA, 20 bp, synthetic construct
  misc_feature 1..20: note = Description of Artificial Sequence: Synthetic oligonucleotide
  misc_feature 1..20: note = Target: ANGPTL4; (-) strand; PAM type: NRG; PAM sequence: AGG
  source 1..20: mol_type = other DNA
gaggggtgaaaaccttggtg

SEQ ID NO: 7601 - DNA, 20 bp, synthetic construct
  misc_feature 1..20: note = Description of Artificial Sequence: Synthetic oligonucleotide
  misc_feature 1..20: note = Target: ANGPTL4; (-) strand; PAM type: NRG; PAM sequence: GAG
  source 1..20: mol_type = other DNA
ggaggggtgaaaaccttggt

SEQ ID NO: 7602 - DNA, 20 bp, synthetic construct
  misc_feature 1..20: note = Description of Artificial Sequence: Synthetic oligonucleotide
  misc_feature 1..20: note = Target: ANGPTL4; (-) strand; PAM type: NRG; PAM sequence: TGG
  source 1..20: mol_type = other DNA
ctggggaggggtgaaaacct

SEQ ID NO: 7603 - DNA, 20 bp, synthetic construct
  misc_feature 1..20: note = Description of Artificial Sequence: Synthetic oligonucleotide
  misc_feature 1..20: note = Target: ANGPTL4; (-) strand; PAM type: NRG; PAM sequence: GGG
  source 1..20: mol_type = other DNA
cttgagttgtgtctggggag

SEQ ID NO: 7604 - DNA, 20 bp, synthetic construct
  misc_feature 1..20: note = Description of Artificial Sequence: Synthetic oligonucleotide
  misc_feature 1..20: note = Target: ANGPTL4; (-) strand; PAM type: NRG; PAM sequence: GGG
  source 1..20: mol_type = other DNA
ccttgagttgtgtctgggga

SEQ ID NO: 7605 - DNA, 20 bp, synthetic construct
  misc_feature 1..20: note = Description of Artificial Sequence: Synthetic oligonucleotide
  misc_feature 1..20: note = Target: ANGPTL4; (-) strand; PAM type: NRG; PAM sequence: AGG
  source 1..20: mol_type = other DNA
gccttgagttgtgtctgggg

SEQ ID NO: 7606 - DNA, 20 bp, synthetic construct
  misc_feature 1..20: note = Description of Artificial Sequence: Synthetic oligonucleotide
  misc_feature 1..20: note = Target: ANGPTL4; (-) strand; PAM type: NRG; PAM sequence: GAG
  source 1..20: mol_type = other DNA
agccttgagttgtgtctggg

SEQ ID NO: 7607 - DNA, 20 bp, synthetic construct
  misc_feature 1..20: note = Description of Artificial Sequence: Synthetic oligonucleotide
  misc_feature 1..20: note = Target: ANGPTL4; (-) strand; PAM type: NRG; PAM sequence: GGG
  source 1..20: mol_type = other DNA
tgagccttgagttgtgtctg

SEQ ID NO: 7608 - DNA, 20 bp, synthetic construct
  misc_feature 1..20: note = Description of Artificial Sequence: Synthetic oligonucleotide
  misc_feature 1..20: note = Target: ANGPTL4; (-) strand; PAM type: NRG; PAM sequence: GGG
  source 1..20: mol_type = other DNA
ctgagccttgagttgtgtct

SEQ ID NO: 7609 - DNA, 20 bp, synthetic construct
  misc_feature 1..20: note = Description of Artificial Sequence: Synthetic oligonucleotide
  misc_feature 1..20: note = Target: ANGPTL4; (-) strand; PAM type: NRG; PAM sequence: TGG
  source 1..20: mol_type = other DNA
tctgagccttgagttgtgtc

SEQ ID NO: 7610 - DNA, 20 bp, synthetic construct
  misc_feature 1..20: note = Description of Artificial Sequence: Synthetic oligonucleotide
  misc_feature 1..20: note = Target: ANGPTL4; (-) strand; PAM type: NRG; PAM sequence: GAG
  source 1..20: mol_type = other DNA
atcctgctgttctgagcctt

SEQ ID NO: 7611 - DNA, 20 bp, synthetic construct
  misc_feature 1..20: note = Description of Artificial Sequence: Synthetic oligonucleotide
  misc_feature 1..20: note = Target: ANGPTL4; (-) strand; PAM type: NRG; PAM sequence: GAG
  source 1..20: mol_type = other DNA
ttgctggatcctgctgttct

SEQ ID NO: 7612 - DNA, 20 bp, synthetic construct
  misc_feature 1..20: note = Description of Artificial Sequence: Synthetic oligonucleotide
  misc_feature 1..20: note = Target: ANGPTL4; (-) strand; PAM type: NRG; PAM sequence: TGG
  source 1..20: mol_type = other DNA
ccaccttgtggaagagttgc

SEQ ID NO: 7613 - DNA, 20 bp, synthetic construct
  misc_feature 1..20: note = Description of Artificial Sequence: Synthetic oligonucleotide
  misc_feature 1..20: note = Target: ANGPTL4; (-) strand; PAM type: NRG; PAM sequence: GAG
  source 1..20: mol_type = other DNA
tgctgggccaccttgtggaa

SEQ ID NO: 7614 - DNA, 20 bp, synthetic construct
  misc_feature 1..20: note = Description of Artificial Sequence: Synthetic oligonucleotide
  misc_feature 1..20: note = Target: ANGPTL4; (-) strand; PAM type: NRG; PAM sequence: AAG
  source 1..20: mol_type = other DNA
gctgctgggccaccttgtgg

SEQ ID NO: 7615 - DNA, 20 bp, synthetic construct
  misc_feature 1..20: note = Description of Artificial Sequence: Synthetic oligonucleotide
  misc_feature 1..20: note = Target: ANGPTL4; (-) strand; PAM type: NRG; PAM sequence: TGG
  source 1..20: mol_type = other DNA
gctgctgctgggccaccttg

SEQ ID NO: 7616 - DNA, 20 bp, synthetic construct
  misc_feature 1..20: note = Description of Artificial Sequence: Synthetic oligonucleotide
  misc_feature 1..20: note = Target: ANGPTL4; (-) strand; PAM type: NRG; PAM sequence: GGG
  source 1..20: mol_type = other DNA
ctccaggtgccgctgctgct

SEQ ID NO: 7617 - DNA, 20 bp, synthetic construct
  misc_feature 1..20: note = Description of Artificial Sequence: Synthetic oligonucleotide
  misc_feature 1..20: note = Target: ANGPTL4; (-) strand; PAM type: NRG; PAM sequence: TGG
  source 1..20: mol_type = other DNA
tctccaggtgccgctgctgc

SEQ ID NO: 7618 - DNA, 20 bp, synthetic construct
  misc_feature 1..20: note = Description of Artificial Sequence: Synthetic oligonucleotide
  misc_feature 1..20: note = Target: ANGPTL4; (-) strand; PAM type: NRG; PAM sequence: AGG
  source 1..20: mol_type = other DNA
ttcgcaggtgctgcttctcc

SEQ ID NO: 7619 - DNA, 20 bp, synthetic construct
  misc_feature 1..20: note = Description of Artificial Sequence: Synthetic oligonucleotide
  misc_feature 1..20: note = Target: ANGPTL4; (-) strand; PAM type: NRG; PAM sequence: CAG
  source 1..20: mol_type = other DNA
attcgcaggtgctgcttctc

SEQ ID NO: 7620 - DNA, 20 bp, synthetic construct
  misc_feature 1..20: note = Description of Artificial Sequence: Synthetic oligonucleotide
  misc_feature 1..20: note = Target: ANGPTL4; (-) strand; PAM type: NRG; PAM sequence: AGG
  source 1..20: mol_type = other DNA
tttgcagatgctgaattcgc

SEQ ID NO: 7621 - DNA, 20 bp, synthetic construct
  misc_feature 1..20: note = Description of Artificial Sequence: Synthetic oligonucleotide
  misc_feature 1..20: note = Target: ANGPTL4; (-) strand; PAM type: NRG; PAM sequence: CAG
  source 1..20: mol_type = other DNA
ctttgcagatgctgaattcg

SEQ ID NO: 7622 - DNA, 20 bp, synthetic construct
  misc_feature 1..20: note = Description of Artificial Sequence: Synthetic oligonucleotide
  misc_feature 1..20: note = Target: ANGPTL4; (-) strand; PAM type: NRG; PAM sequence: CAG
  source 1..20: mol_type = other DNA
cctagggttacctggctttg

SEQ ID NO: 7623 - DNA, 20 bp, synthetic construct
  misc_feature 1..20: note = Description of Artificial Sequence: Synthetic oligonucleotide
  misc_feature 1..20: note = Target: ANGPTL4; (-) strand; PAM type: NRG; PAM sequence: TGG
  source 1..20: mol_type = other DNA
cccttgatcctagggttacc

SEQ ID NO: 7624 - DNA, 20 bp, synthetic construct
  misc_feature 1..20: note = Description of Artificial Sequence: Synthetic oligonucleotide
  misc_feature 1..20: note = Target: ANGPTL4; (-) strand; PAM type: NRG; PAM sequence: GGG
  source 1..20: mol_type = other DNA
ccttttctcccttgatccta

SEQ ID NO: 7625 - DNA, 20 bp, synthetic construct
  misc_feature 1..20: note = Description of Artificial Sequence: Synthetic oligonucleotide
  misc_feature 1..20: note = Target: ANGPTL4; (-) strand; PAM type: NRG; PAM sequence: AGG
  source 1..20: mol_type = other DNA
accttttctcccttgatcct

SEQ ID NO: 7626 - DNA, 20 bp, synthetic construct
  misc_feature 1..20: note = Description of Artificial Sequence: Synthetic oligonucleotide
  misc_feature 1..20: note = Target: ANGPTL4; (-) strand; PAM type: NRG; PAM sequence: TAG
  source 1..20: mol_type = other DNA
gaccttttctcccttgatcc

SEQ ID NO: 7627 - DNA, 20 bp, synthetic construct
  misc_feature 1..20: note = Description of Artificial Sequence: Synthetic oligonucleotide
  misc_feature 1..20: note = Target: ANGPTL4; (-) strand; PAM type: NRG; PAM sequence: GGG
  source 1..20: mol_type = other DNA
cctggggtccagctatcaga

SEQ ID NO: 7628 - DNA, 20 bp, synthetic construct
  misc_feature 1..20: note = Description of Artificial Sequence: Synthetic oligonucleotide
  misc_feature 1..20: note = Target: ANGPTL4; (-) strand; PAM type: NRG; PAM sequence: AGG
  source 1..20: mol_type = other DNA
acctggggtccagctatcag

SEQ ID NO: 7629 - DNA, 20 bp, synthetic construct
  misc_feature 1..20: note = Description of Artificial Sequence: Synthetic oligonucleotide
  misc_feature 1..20: note = Target: ANGPTL4; (-) strand; PAM type: NRG; PAM sequence: GAG
  source 1..20: mol_type = other DNA
aacctggggtccagctatca

SEQ ID NO: 7630 - DNA, 20 bp, synthetic construct
  misc_feature 1..20: note = Description of Artificial Sequence: Synthetic oligonucleotide
  misc_feature 1..20: note = Target: ANGPTL4; (-) strand; PAM type: NRG; PAM sequence: CAG
  source 1..20: mol_type = other DNA
tcaacctggggtccagctat

SEQ ID NO: 7631 - DNA, 20 bp, synthetic construct
  misc_feature 1..20: note = Description of Artificial Sequence: Synthetic oligonucleotide
  misc_feature 1..20: note = Target: ANGPTL4; (-) strand; PAM type: NRG; PAM sequence: CAG
  source 1..20: mol_type = other DNA
ctccctctcaacctggggtc

SEQ ID NO: 7632 - DNA, 20 bp, synthetic construct
  misc_feature 1..20: note = Description of Artificial Sequence: Synthetic oligonucleotide
  misc_feature 1..20: note = Target: ANGPTL4; (-) strand; PAM type: NRG; PAM sequence: GGG
  source 1..20: mol_type = other DNA
accacctccctctcaacctg

SEQ ID NO: 7633 - DNA, 20 bp, synthetic construct
  misc_feature 1..20: note = Description of Artificial Sequence: Synthetic oligonucleotide
  misc_feature 1..20: note = Target: ANGPTL4; (-) strand; PAM type: NRG; PAM sequence: GGG
  source 1..20: mol_type = other DNA
caccacctccctctcaacct

SEQ ID NO: 7634 - DNA, 20 bp, synthetic construct
  misc_feature 1..20: note = Description of Artificial Sequence: Synthetic oligonucleotide
  misc_feature 1..20: note = Target: ANGPTL4; (-) strand; PAM type: NRG; PAM sequence: TGG
  source 1..20: mol_type = other DNA
tcaccacctccctctcaacc

SEQ ID NO: 7635 - DNA, 20 bp, synthetic construct
  misc_feature 1..20: note = Description of Artificial Sequence: Synthetic oligonucleotide
  misc_feature 1..20: note = Target: ANGPTL4; (-) strand; PAM type: NRG; PAM sequence: CAG
  source 1..20: mol_type = other DNA
cacgtccccagccacacgtc

SEQ ID NO: 7636 - DNA, 20 bp, synthetic construct
  misc_feature 1..20: note = Description of Artificial Sequence: Synthetic oligonucleotide
  misc_feature 1..20: note = Target: ANGPTL4; (-) strand; PAM type: NRG; PAM sequence: CAG
  source 1..20: mol_type = other DNA
cctgcctggccccacgtccc

SEQ ID NO: 7637 - DNA, 20 bp, synthetic construct
  misc_feature 1..20: note = Description of Artificial Sequence: Synthetic oligonucleotide
  misc_feature 1..20: note = Target: ANGPTL4; (-) strand; PAM type: NRG; PAM sequence: TGG
  source 1..20: mol_type = other DNA
ggagggtgtcaggtcctgcc

SEQ ID NO: 7638 - DNA, 20 bp, synthetic construct
  misc_feature 1..20: note = Description of Artificial Sequence: Synthetic oligonucleotide
  misc_feature 1..20: note = Target: ANGPTL4; (-) strand; PAM type: NRG; PAM sequence: AGG
  source 1..20: mol_type = other DNA
tgggacgggaggagggtgtc

SEQ ID NO: 7639 - DNA, 20 bp, synthetic construct
  misc_feature 1..20: note = Description of Artificial Sequence: Synthetic oligonucleotide
  misc_feature 1..20: note = Target: ANGPTL4; (-) strand; PAM type: NRG; PAM sequence: CAG
  source 1..20: mol_type = other DNA
atgggacgggaggagggtgt

SEQ ID NO: 7640 - DNA, 20 bp, synthetic construct
  misc_feature 1..20: note = Description of Artificial Sequence: Synthetic oligonucleotide
  misc_feature 1..20: note = Target: ANGPTL4; (-) strand; PAM type: NRG; PAM sequence: GGG
  source 1..20: mol_type = other DNA
actaggatgggacgggagga

SEQ ID NO: 7641 - DNA, 20 bp, synthetic construct
  misc_feature 1..20: note = Description of Artificial Sequence: Synthetic oligonucleotide
  misc_feature 1..20: note = Target: ANGPTL4; (-) strand; PAM type: NRG; PAM sequence: AGG
  source 1..20: mol_type = other DNA
aactaggatgggacgggagg

SEQ ID NO: 7642 - DNA, 20 bp, synthetic construct
  misc_feature 1..20: note = Description of Artificial Sequence: Synthetic oligonucleotide
  misc_feature 1..20: note = Target: ANGPTL4; (-) strand; PAM type: NRG; PAM sequence: GAG
  source 1..20: mol_type = other DNA
aaactaggatgggacgggag

SEQ ID NO: 7643 - DNA, 20 bp, synthetic construct
  misc_feature 1..20: note = Description of Artificial Sequence: Synthetic oligonucleotide
  misc_feature 1..20: note = Target: ANGPTL4; (-) strand; PAM type: NRG; PAM sequence: AGG
  source 1..20: mol_type = other DNA
ccaaactaggatgggacggg

SEQ ID NO: 7644 - DNA, 20 bp, synthetic construct
  misc_feature 1..20: note = Description of Artificial Sequence: Synthetic oligonucleotide
  misc_feature 1..20: note = Target: ANGPTL4; (-) strand; PAM type: NRG; PAM sequence: GAG
  source 1..20: mol_type = other DNA
gccaaactaggatgggacgg

SEQ ID NO: 7645 - DNA, 20 bp, synthetic construct
  misc_feature 1..20: note = Description of Artificial Sequence: Synthetic oligonucleotide
  misc_feature 1..20: note = Target: ANGPTL4; (-) strand; PAM type: NRG; PAM sequence: GGG
  source 1..20: mol_type = other DNA
aggccaaactaggatgggac

SEQ ID NO: 7646 - DNA, 20 bp, synthetic construct
  misc_feature 1..20: note = Description of Artificial Sequence: Synthetic oligonucleotide
  misc_feature 1..20: note = Target: ANGPTL4; (-) strand; PAM type: NRG; PAM sequence: CGG
  source 1..20: mol_type = other DNA
gaggccaaactaggatggga

SEQ ID NO: 7647 - DNA, 20 bp, synthetic construct
  misc_feature 1..20: note = Description of Artificial Sequence: Synthetic oligonucleotide
  misc_feature 1..20: note = Target: ANGPTL4; (-) strand; PAM type: NRG; PAM sequence: GGG
  source 1..20: mol_type = other DNA
ccaggaggccaaactaggat

SEQ ID NO: 7648 - DNA, 20 bp, synthetic construct
  misc_feature 1..20: note = Description of Artificial Sequence: Synthetic oligonucleotide
  misc_feature 1..20: note = Target: ANGPTL4; (-) strand; PAM type: NRG; PAM sequence: TGG
  source 1..20: mol_type = other DNA
tccaggaggccaaactagga

SEQ ID NO: 7649 - DNA, 20 bp, synthetic construct
  misc_feature 1..20: note = Description of Artificial Sequence: Synthetic oligonucleotide
  misc_feature 1..20: note = Target: ANGPTL4; (-) strand; PAM type: NRG; PAM sequence: AGG
  source 1..20: mol_type = other DNA
gtggtccaggaggccaaact

SEQ ID NO: 7650 - DNA, 20 bp, synthetic construct
  misc_feature 1..20: note = Description of Artificial Sequence: Synthetic oligonucleotide
  misc_feature 1..20: note = Target: ANGPTL4; (-) strand; PAM type: NRG; PAM sequence: TAG
  source 1..20: mol_type = other DNA
tgtggtccaggaggccaaac

SEQ ID NO: 7651 - DNA, 20 bp, synthetic construct
  misc_feature 1..20: note = Description of Artificial Sequence: Synthetic oligonucleotide
  misc_feature 1..20: note = Target: ANGPTL4; (-) strand; PAM type: NRG; PAM sequence: AGG
  source 1..20: mol_type = other DNA
ctaggtgcttgtggtccagg

SEQ ID NO: 7652 - DNA, 20 bp, synthetic construct
  misc_feature 1..20: note = Description of Artificial Sequence: Synthetic oligonucleotide
  misc_feature 1..20: note = Target: ANGPTL4; (-) strand; PAM type: NRG; PAM sequence: GAG
  source 1..20: mol_type = other DNA
tctaggtgcttgtggtccag

SEQ ID NO: 7653 - DNA, 20 bp, synthetic construct
  misc_feature 1..20: note = Description of Artificial Sequence: Synthetic oligonucleotide
  misc_feature 1..20: note = Target: ANGPTL4; (-) strand; PAM type: NRG; PAM sequence: AGG
  source 1..20: mol_type = other DNA
ggtctaggtgcttgtggtcc

SEQ ID NO: 7654 - DNA, 20 bp, synthetic construct
  misc_feature 1..20: note = Description of Artificial Sequence: Synthetic oligonucleotide
  misc_feature 1..20: note = Target: ANGPTL4; (-) strand; PAM type: NRG; PAM sequence: CAG
  source 1..20: mol_type = other DNA
tggtctaggtgcttgtggtc

SEQ ID NO: 7655 - DNA, 20 bp, synthetic construct
  misc_feature 1..20: note = Description of Artificial Sequence: Synthetic oligonucleotide
  misc_feature 1..20: note = Target: ANGPTL4; (-) strand; PAM type: NRG; PAM sequence: TGG
  source 1..20: mol_type = other DNA
cctcatggtctaggtgcttg

SEQ ID NO: 7656 - DNA, 20 bp, synthetic construct
  misc_feature 1..20: note = Description of Artificial Sequence: Synthetic oligonucleotide
  misc_feature 1..20: note = Target: ANGPTL4; (-) strand; PAM type: NRG; PAM sequence: AGG
  source 1..20: mol_type = other DNA
gcttggccacctcatggtct

SEQ ID NO: 7657 - DNA, 20 bp, synthetic construct
  misc_feature 1..20: note = Description of Artificial Sequence: Synthetic oligonucleotide
  misc_feature 1..20: note = Target: ANGPTL4; (-) strand; PAM type: NRG; PAM sequence: TAG
  source 1..20: mol_type = other DNA
ggcttggccacctcatggtc

SEQ ID NO: 7658 - DNA, 20 bp, synthetic construct
  misc_feature 1..20: note = Description of Artificial Sequence: Synthetic oligonucleotide
  misc_feature 1..20: note = Target: ANGPTL4; (-) strand; PAM type: NRG; PAM sequence: TGG
  source 1..20: mol_type = other DNA
gggcaggcttggccacctca

SEQ ID NO: 7659 - DNA, 20 bp, synthetic construct
  misc_feature 1..20: note = Description of Artificial Sequence: Synthetic oligonucleotide
  misc_feature 1..20: note = Target: ANGPTL4; (-) strand; PAM type: NRG; PAM sequence: TGG
  source 1..20: mol_type = other DNA
cctctttcttcgggcaggct

SEQ ID NO: 7660 - DNA, 20 bp, synthetic construct
  misc_feature 1..20: note = Description of Artificial Sequence: Synthetic oligonucleotide
  misc_feature 1..20: note = Target: ANGPTL4; (-) strand; PAM type: NRG; PAM sequence: AGG
  source 1..20: mol_type = other DNA
ggcagcctctttcttcgggc

SEQ ID NO: 7661 - DNA, 20 bp, synthetic construct
  misc_feature 1..20: note = Description of Artificial Sequence: Synthetic oligonucleotide
  misc_feature 1..20: note = Target: ANGPTL4; (-) strand; PAM type: NRG; PAM sequence: CAG
  source 1..20: mol_type = other DNA
gggcagcctctttcttcggg

SEQ ID NO: 7662 - DNA, 20 bp, synthetic construct
  misc_feature 1..20: note = Description of Artificial Sequence: Synthetic oligonucleotide
  misc_feature 1..20: note = Target: ANGPTL4; (-) strand; PAM type: NRG; PAM sequence: GGG
  source 1..20: mol_type = other DNA
ctcgggcagcctctttcttc

SEQ ID NO: 7663 - DNA, 20 bp, synthetic construct
  misc_feature 1..20: note = Description of Artificial Sequence: Synthetic oligonucleotide
  misc_feature 1..20: note = Target: ANGPTL4; (-) strand; PAM type: NRG; PAM sequence: CGG
  source 1..20: mol_type = other DNA
tctcgggcagcctctttctt

SEQ ID NO: 7664 - DNA, 20 bp, synthetic construct
  misc_feature 1..20: note = Description of Artificial Sequence: Synthetic oligonucleotide
  misc_feature 1..20: note = Target: ANGPTL4; (-) strand; PAM type: NRG; PAM sequence: CAG
  source 1..20: mol_type = other DNA
actggctgggccatctcggg

SEQ ID NO: 7665 - DNA, 20 bp, synthetic construct
  misc_feature 1..20: note = Description of Artificial Sequence: Synthetic oligonucleotide
  misc_feature 1..20: note = Target: ANGPTL4; (-) strand; PAM type: NRG; PAM sequence: GGG
  source 1..20: mol_type = other DNA
tcaactggctgggccatctc

SEQ ID NO: 7666 - DNA, 20 bp, synthetic construct
  misc_feature 1..20: note = Description of Artificial Sequence: Synthetic oligonucleotide
  misc_feature 1..20: note = Target: ANGPTL4; (-) strand; PAM type: NRG; PAM sequence: CGG
  source 1..20: mol_type = other DNA
gtcaactggctgggccatct

SEQ ID NO: 7667 - DNA, 20 bp, synthetic construct
  misc_feature 1..20: note = Description of Artificial Sequence: Synthetic oligonucleotide
  misc_feature 1..20: note = Target: ANGPTL4; (-) strand; PAM type: NRG; PAM sequence: GGG
  source 1..20: mol_type = other DNA
gtgagccgggtcaactggct

SEQ ID NO: 7668 - DNA, 20 bp, synthetic construct
  misc_feature 1..20: note = Description of Artificial Sequence: Synthetic oligonucleotide
  misc_feature 1..20: note = Target: ANGPTL4; (-) strand; PAM type: NRG; PAM sequence: TGG
  source 1..20: mol_type = other DNA
tgtgagccgggtcaactggc

SEQ ID NO: 7669 - DNA, 20 bp, synthetic construct
  misc_feature 1..20: note = Description of Artificial Sequence: Synthetic oligonucleotide
  misc_feature 1..20: note = Target: ANGPTL4; (-) strand; PAM type: NRG; PAM sequence: TGG
  source 1..20: mol_type = other DNA
acattgtgagccgggtcaac

SEQ ID NO: 7670 - DNA, 20 bp, synthetic construct
  misc_feature 1..20: note = Description of Artificial Sequence: Synthetic oligonucleotide
  misc_feature 1..20: note = Target: ANGPTL4; (-) strand; PAM type: NRG; PAM sequence: GGG
  source 1..20: mol_type = other DNA
ggcggctgacattgtgagcc

SEQ ID NO: 7671 - DNA, 20 bp, synthetic construct
  misc_feature 1..20: note = Description of Artificial Sequence: Synthetic oligonucleotide
  misc_feature 1..20: note = Target: ANGPTL4; (-) strand; PAM type: NRG; PAM sequence: CGG
  source 1..20: mol_type = other DNA
aggcggctgacattgtgagc

SEQ ID NO: 7672 - DNA, 20 bp, synthetic construct
  misc_feature 1..20: note = Description of Artificial Sequence: Synthetic oligonucleotide
  misc_feature 1..20: note = Target: ANGPTL4; (-) strand; PAM type: NRG; PAM sequence: GAG
  source 1..20: mol_type = other DNA
gtgcaggcggctgacattgt

SEQ ID NO: 7673 - DNA, 20 bp, synthetic construct
  misc_feature 1..20: note = Description of Artificial Sequence: Synthetic oligonucleotide
  misc_feature 1..20: note = Target: ANGPTL4; (-) strand; PAM type: NRG; PAM sequence: CGG
  source 1..20: mol_type = other DNA
gcagacactcacggtgcagg

SEQ ID NO: 7674 - DNA, 20 bp, synthetic construct
  misc_feature 1..20: note = Description of Artificial Sequence: Synthetic oligonucleotide
  misc_feature 1..20: note = Target: ANGPTL4; (-) strand; PAM type: NRG; PAM sequence: AGG
  source 1..20: mol_type = other DNA
ggggcagacactcacggtgc

SEQ ID NO: 7675 - DNA, 20 bp, synthetic construct
  misc_feature 1..20: note = Description of Artificial Sequence: Synthetic oligonucleotide
  misc_feature 1..20: note = Target: ANGPTL4; (-) strand; PAM type: NRG; PAM sequence: CAG
  source 1..20: mol_type = other DNA
aggggcagacactcacggtg

SEQ ID NO: 7676 - DNA, 20 bp, synthetic construct
  misc_feature 1..20: note = Description of Artificial Sequence: Synthetic oligonucleotide
  misc_feature 1..20: note = Target: ANGPTL4; (-) strand; PAM type: NRG; PAM sequence: CGG
  source 1..20: mol_type = other DNA
catcgaggggcagacactca

SEQ ID NO: 7677 - DNA, 20 bp, synthetic construct
  misc_feature 1..20: note = Description of Artificial Sequence: Synthetic oligonucleotide
  misc_feature 1..20: note = Target: ANGPTL4; (-) strand; PAM type: NRG; PAM sequence: CAG
  source 1..20: mol_type = other DNA
caccggagagcatcgagggg

SEQ ID NO: 7678 - DNA, 20 bp, synthetic construct
  misc_feature 1..20: note = Description of Artificial Sequence: Synthetic oligonucleotide
  misc_feature 1..20: note = Target: ANGPTL4; (-) strand; PAM type: NRG; PAM sequence: GGG
  source 1..20: mol_type = other DNA
ggccaccggagagcatcgag

SEQ ID NO: 7679 - DNA, 20 bp, synthetic construct
  misc_feature 1..20: note = Description of Artificial Sequence: Synthetic oligonucleotide
  misc_feature 1..20: note = Target: ANGPTL4; (-) strand; PAM type: NRG; PAM sequence: GGG
  source 1..20: mol_type = other DNA
tggccaccggagagcatcga

SEQ ID NO: 7680 - DNA, 20 bp, synthetic construct
  misc_feature 1..20: note = Description of Artificial Sequence: Synthetic oligonucleotide
  misc_feature 1..20: note = Target: ANGPTL4; (-) strand; PAM type: NRG; PAM sequence: AGG
  source 1..20: mol_type = other DNA
gtggccaccggagagcatcg

SEQ ID NO: 7681 - DNA, 20 bp, synthetic construct
  misc_feature 1..20: note = Description of Artificial Sequence: Synthetic oligonucleotide
  misc_feature 1..20: note = Target: ANGPTL4; (-) strand; PAM type: NRG; PAM sequence: GAG
  source 1..20: mol_type = other DNA
ggtggccaccggagagcatc

SEQ ID NO: 7682 - DNA, 20 bp, synthetic construct
  misc_feature 1..20: note = Description of Artificial Sequence: Synthetic oligonucleotide
  misc_feature 1..20: note = Target: ANGPTL4; (-) strand; PAM type: NRG; PAM sequence: GAG
  source 1..20: mol_type = other DNA
gggtaggggtggccaccgga

SEQ ID NO: 7683 - DNA, 20 bp, synthetic construct
  misc_feature 1..20: note = Description of Artificial Sequence: Synthetic oligonucleotide
  misc_feature 1..20: note = Target: ANGPTL4; (-) strand; PAM type: NRG; PAM sequence: GAG
  source 1..20: mol_type = other DNA
cggggtaggggtggccaccg

SEQ ID NO: 7684 - DNA, 20 bp, synthetic construct
  misc_feature 1..20: note = Description of Artificial Sequence: Synthetic oligonucleotide
  misc_feature 1..20: note = Target: ANGPTL4; (-) strand; PAM type: NRG; PAM sequence: CGG
  source 1..20: mol_type = other DNA
ggcggggtaggggtggccac

SEQ ID NO: 7685 - DNA, 20 bp, synthetic construct
  misc_feature 1..20: note = Description of Artificial Sequence: Synthetic oligonucleotide
  misc_feature 1..20: note = Target: ANGPTL4; (-) strand; PAM type: NRG; PAM sequence: TGG
  source 1..20: mol_type = other DNA
ggcaagtggcggggtagggg

SEQ ID NO: 7686 - DNA, 20 bp, synthetic construct
  misc_feature 1..20: note = Description of Artificial Sequence: Synthetic oligonucleotide
  misc_feature 1..20: note = Target: ANGPTL4; (-) strand; PAM type: NRG; PAM sequence: GGG
  source 1..20: mol_type = other DNA
aatggcaagtggcggggtag

SEQ ID NO: 7687 - DNA, 20 bp, synthetic construct
  misc_feature 1..20: note = Description of Artificial Sequence: Synthetic oligonucleotide
  misc_feature 1..20: note = Target: ANGPTL4; (-) strand; PAM type: NRG; PAM sequence: GGG
  source 1..20: mol_type = other DNA
caatggcaagtggcggggta

SEQ ID NO: 7688 - DNA, 20 bp, synthetic construct
  misc_feature 1..20: note = Description of Artificial Sequence: Synthetic oligonucleotide
  misc_feature 1..20: note = Target: ANGPTL4; (-) strand; PAM type: NRG; PAM sequence: AGG
  source 1..20: mol_type = other DNA
gcaatggcaagtggcggggt

SEQ ID NO: 7689 - DNA, 20 bp, synthetic construct
  misc_feature 1..20: note = Description of Artificial Sequence: Synthetic oligonucleotide
  misc_feature 1..20: note = Target: ANGPTL4; (-) strand; PAM type: NRG; PAM sequence: TAG
  source 1..20: mol_type = other DNA
agcaatggcaagtggcgggg

SEQ ID NO: 7690 - DNA, 20 bp, synthetic construct
  misc_feature 1..20: note = Description of Artificial Sequence: Synthetic oligonucleotide
  misc_feature 1..20: note = Target: ANGPTL4; (-) strand; PAM type: NRG; PAM sequence: GGG
  source 1..20: mol_type = other DNA
accagcaatggcaagtggcg

SEQ ID NO: 7691 - DNA, 20 bp, synthetic construct
  misc_feature 1..20: note = Description of Artificial Sequence: Synthetic oligonucleotide
  misc_feature 1..20: note = Target: ANGPTL4; (-) strand; PAM type: NRG; PAM sequence: GGG
  source 1..20: mol_type = other DNA
gaccagcaatggcaagtggc

SEQ ID NO: 7692 - DNA, 20 bp, synthetic construct
  misc_feature 1..20: note = Description of Artificial Sequence: Synthetic oligonucleotide
  misc_feature 1..20: note = Target: ANGPTL4; (-) strand; PAM type: NRG; PAM sequence: CGG
  source 1..20: mol_type = other DNA
ggaccagcaatggcaagtgg

SEQ ID NO: 7693 - DNA, 20 bp, synthetic construct
  misc_feature 1..20: note = Description of Artificial Sequence: Synthetic oligonucleotide
  misc_feature 1..20: note = Target: ANGPTL4; (-) strand; PAM type: NRG; PAM sequence: TGG
  source 1..20: mol_type = other DNA
agaggaccagcaatggcaag

SEQ ID NO: 7694 - DNA, 20 bp, synthetic construct
  misc_feature 1..20: note = Description of Artificial Sequence: Synthetic oligonucleotide
  misc_feature 1..20: note = Target: ANGPTL4; (-) strand; PAM type: NRG; PAM sequence: AAG
  source 1..20: mol_type = other DNA
aggagaggaccagcaatggc

SEQ ID NO: 7695 - DNA, 20 bp, synthetic construct
  misc_feature 1..20: note = Description of Artificial Sequence: Synthetic oligonucleotide
  misc_feature 1..20: note = Target: ANGPTL4; (-) strand; PAM type: NRG; PAM sequence: TGG
  source 1..20: mol_type = other DNA
gacaaggagaggaccagcaa

SEQ ID NO: 7696 - DNA, 20 bp, synthetic construct
  misc_feature 1..20: note = Description of Artificial Sequence: Synthetic oligonucleotide
  misc_feature 1..20: note = Target: ANGPTL4; (-) strand; PAM type: NRG; PAM sequence: CAG
  source 1..20: mol_type = other DNA
ggacctgacaaggagaggac

SEQ ID NO: 7697 - DNA, 20 bp, synthetic construct
  misc_feature 1..20: note = Description of Artificial Sequence: Synthetic oligonucleotide
  misc_feature 1..20: note = Target: ANGPTL4; (-) strand; PAM type: NRG; PAM sequence: AGG
  source 1..20: mol_type = other DNA
aaggtggacctgacaaggag

SEQ ID NO: 7698 - DNA, 20 bp, synthetic construct
  misc_feature 1..20: note = Description of Artificial Sequence: Synthetic oligonucleotide
  misc_feature 1..20: note = Target: ANGPTL4; (-) strand; PAM type: NRG; PAM sequence: GAG
  source 1..20: mol_type = other DNA
taaggtggacctgacaagga

SEQ ID NO: 7699 - DNA, 20 bp, synthetic construct
  misc_feature 1..20: note = Description of Artificial Sequence: Synthetic oligonucleotide
  misc_feature 1..20: note = Target: ANGPTL4; (-) strand; PAM type: NRG; PAM sequence: GAG
  source 1..20: mol_type = other DNA
cttaaggtggacctgacaag

SEQ ID NO: 7700 - DNA, 20 bp, synthetic construct
  misc_feature 1..20: note = Description of Artificial Sequence: Synthetic oligonucleotide
  misc_feature 1..20: note = Target: ANGPTL4; (-) strand; PAM type: NRG; PAM sequence: AGG
  source 1..20: mol_type = other DNA
tccttaaggtggacctgaca

SEQ ID NO: 7701 - DNA, 20 bp, synthetic construct
  misc_feature 1..20: note = Description of Artificial Sequence: Synthetic oligonucleotide
  misc_feature 1..20: note = Target: ANGPTL4; (-) strand; PAM type: NRG; PAM sequence: AAG
  source 1..20: mol_type = other DNA
ctccttaaggtggacctgac

SEQ ID NO: 7702 - DNA, 20 bp, synthetic construct
  misc_feature 1..20: note = Description of Artificial Sequence: Synthetic oligonucleotide
  misc_feature 1..20: note = Target: ANGPTL4; (-) strand; PAM type: NRG; PAM sequence: TGG
  source 1..20: mol_type = other DNA
aggacatcttctccttaagg

SEQ ID NO: 7703 - DNA, 20 bp, synthetic construct
  misc_feature 1..20: note = Description of Artificial Sequence: Synthetic oligonucleotide
  misc_feature 1..20: note = Target: ANGPTL4; (-) strand; PAM type: NRG; PAM sequence: AGG
  source 1..20: mol_type = other DNA
gccaggacatcttctcctta

SEQ ID NO: 7704 - DNA, 20 bp, synthetic construct
  misc_feature 1..20: note = Description of Artificial Sequence: Synthetic oligonucleotide
  misc_feature 1..20: note = Target: ANGPTL4; (-) strand; PAM type: NRG; PAM sequence: AAG
  source 1..20: mol_type = other DNA
ggccaggacatcttctcctt

SEQ ID NO: 7705 - DNA, 20 bp, synthetic construct
  misc_feature 1..20: note = Description of Artificial Sequence: Synthetic oligonucleotide
  misc_feature 1..20: note = Target: ANGPTL4; (-) strand; PAM type: NRG; PAM sequence: AGG
  source 1..20: mol_type = other DNA
gccctcagggactccaggcc

SEQ ID NO: 7706 - DNA, 20 bp, synthetic construct
  misc_feature 1..20: note = Description of Artificial Sequence: Synthetic oligonucleotide
  misc_feature 1..20: note = Target: ANGPTL4; (-) strand; PAM type: NRG; PAM sequence: CAG
  source 1..20: mol_type = other DNA
agccctcagggactccaggc

SEQ ID NO: 7707 - DNA, 20 bp, synthetic construct
  misc_feature 1..20: note = Description of Artificial Sequence: Synthetic oligonucleotide
  misc_feature 1..20: note = Target: ANGPTL4; (-) strand; PAM type: NRG; PAM sequence: AGG
  source 1..20: mol_type = other DNA
ggtgagccctcagggactcc

SEQ ID NO: 7708 - DNA, 20 bp, synthetic construct
  misc_feature 1..20: note = Description of Artificial Sequence: Synthetic oligonucleotide
  misc_feature 1..20: note = Target: ANGPTL4; (-) strand; PAM type: NRG; PAM sequence: CAG
  source 1..20: mol_type = other DNA
tggtgagccctcagggactc

SEQ ID NO: 7709 - DNA, 20 bp, synthetic construct
  misc_feature 1..20: note = Description of Artificial Sequence: Synthetic oligonucleotide
  misc_feature 1..20: note = Target: ANGPTL4; (-) strand; PAM type: NRG; PAM sequence: GGG
  source 1..20: mol_type = other DNA
cagagactggtgagccctca

SEQ ID NO: 7710 - DNA, 20 bp, synthetic construct
  misc_feature 1..20: note = Description of Artificial Sequence: Synthetic oligonucleotide
  misc_feature 1..20: note = Target: ANGPTL4; (-) strand; PAM type: NRG; PAM sequence: AGG
  source 1..20: mol_type = other DNA
ccagagactggtgagccctc

SEQ ID NO: 7711 - DNA, 20 bp, synthetic construct
  misc_feature 1..20: note = Description of Artificial Sequence: Synthetic oligonucleotide
  misc_feature 1..20: note = Target: ANGPTL4; (-) strand; PAM type: NRG; PAM sequence: CAG
  source 1..20: mol_type = other DNA
cccagagactggtgagccct

SEQ ID NO: 7712 - DNA, 20 bp, synthetic construct
  misc_feature 1..20: note = Description of Artificial Sequence: Synthetic oligonucleotide
  misc_feature 1..20: note = Target: ANGPTL4; (-) strand; PAM type: NRG; PAM sequence: GAG
  source 1..20: mol_type = other DNA
gctttgacccagagactggt

SEQ ID NO: 7713 - DNA, 20 bp, synthetic construct
  misc_feature 1..20: note = Description of Artificial Sequence: Synthetic oligonucleotide
  misc_feature 1..20: note = Target: ANGPTL4; (-) strand; PAM type: NRG; PAM sequence: TGG
  source 1..20: mol_type = other DNA
atcagctttgacccagagac

SEQ ID NO: 7714 - DNA, 20 bp, synthetic construct
  misc_feature 1..20: note = Description of Artificial Sequence: Synthetic oligonucleotide
  misc_feature 1..20: note = Target: ANGPTL4; (-) strand; PAM type: NRG; PAM sequence: GAG
  source 1..20: mol_type = other DNA
ctcccatcagctttgaccca

SEQ ID NO: 7715 - DNA, 20 bp, synthetic construct
  misc_feature 1..20: note = Description of Artificial Sequence: Synthetic oligonucleotide
  misc_feature 1..20: note = Target: ANGPTL4; (-) strand; PAM type: NRG; PAM sequence: CAG
  source 1..20: mol_type = other DNA
tgctcccatcagctttgacc

SEQ ID NO: 7716 - DNA, 20 bp, synthetic construct
  misc_feature 1..20: note = Description of Artificial Sequence: Synthetic oligonucleotide
  misc_feature 1..20: note = Target: ANGPTL4; (-) strand; PAM type: NRG; PAM sequence: CAG
  source 1..20: mol_type = other DNA
gaggaaggaggtgctcccat

SEQ ID NO: 7717 - DNA, 20 bp, synthetic construct
  misc_feature 1..20: note = Description of Artificial Sequence: Synthetic oligonucleotide
  misc_feature 1..20: note = Target: ANGPTL4; (-) strand; PAM type: NRG; PAM sequence: AGG
  source 1..20: mol_type = other DNA
caggtcagggctgaggaagg

SEQ ID NO: 7718 - DNA, 20 bp, synthetic construct
  misc_feature 1..20: note = Description of Artificial Sequence: Synthetic oligonucleotide
  misc_feature 1..20: note = Target: ANGPTL4; (-) strand; PAM type: NRG; PAM sequence: GAG
  source 1..20: mol_type = other DNA
ccaggtcagggctgaggaag

SEQ ID NO: 7719 - DNA, 20 bp, synthetic construct
  misc_feature 1..20: note = Description of Artificial Sequence: Synthetic oligonucleotide
  misc_feature 1..20: note = Target: ANGPTL4; (-) strand; PAM type: NRG; PAM sequence: AGG
  source 1..20: mol_type = other DNA
ggccaggtcagggctgagga

SEQ ID NO: 7720 - DNA, 20 bp, synthetic construct
  misc_feature 1..20: note = Description of Artificial Sequence: Synthetic oligonucleotide
  misc_feature 1..20: note = Target: ANGPTL4; (-) strand; PAM type: NRG; PAM sequence: AAG
  source 1..20: mol_type = other DNA
gggccaggtcagggctgagg

SEQ ID NO: 7721 - DNA, 20 bp, synthetic construct
  misc_feature 1..20: note = Description of Artificial Sequence: Synthetic oligonucleotide
  misc_feature 1..20: note = Target: ANGPTL4; (-) strand; PAM type: NRG; PAM sequence: AGG
  source 1..20: mol_type = other DNA
gctgggccaggtcagggctg

SEQ ID NO: 7722 - DNA, 20 bp, synthetic construct
  misc_feature 1..20: note = Description of Artificial Sequence: Synthetic oligonucleotide
  misc_feature 1..20: note = Target: ANGPTL4; (-) strand; PAM type: NRG; PAM sequence: GAG
  source 1..20: mol_type = other DNA
ggctgggccaggtcagggct

SEQ ID NO: 7723 - DNA, 20 bp, synthetic construct
  misc_feature 1..20: note = Description of Artificial Sequence: Synthetic oligonucleotide
  misc_feature 1..20: note = Target: ANGPTL4; (-) strand; PAM type: NRG; PAM sequence: GGG
  source 1..20: mol_type = other DNA
ggcctggctgggccaggtca

SEQ ID NO: 7724 - DNA, 20 bp, synthetic construct
  misc_feature 1..20: note = Description of Artificial Sequence: Synthetic oligonucleotide
  misc_feature 1..20: note = Target: ANGPTL4; (-) strand; PAM type: NRG; PAM sequence: AGG
  source 1..20: mol_type = other DNA
tggcctggctgggccaggtc

SEQ ID NO: 7725 - DNA, 20 bp, synthetic construct
  misc_feature 1..20: note = Description of Artificial Sequence: Synthetic oligonucleotide
  misc_feature 1..20: note = Target: ANGPTL4; (-) strand; PAM type: NRG; PAM sequence: CAG
  source 1..20: mol_type = other DNA
gtggcctggctgggccaggt

SEQ ID NO: 7726 - DNA, 20 bp, synthetic construct
  misc_feature 1..20: note = Description of Artificial Sequence: Synthetic oligonucleotide
  misc_feature 1..20: note = Target: ANGPTL4; (-) strand; PAM type: NRG; PAM sequence: AGG
  source 1..20: mol_type = other DNA
ttgggtggcctggctgggcc

SEQ ID NO: 7727 - DNA, 20 bp, synthetic construct
  misc_feature 1..20: note = Description of Artificial Sequence: Synthetic oligonucleotide
  misc_feature 1..20: note = Target: ANGPTL4; (-) strand; PAM type: NRG; PAM sequence: CAG
  source 1..20: mol_type = other DNA
gttgggtggcctggctgggc

SEQ ID NO: 7728 - DNA, 20 bp, synthetic construct
  misc_feature 1..20: note = Description of Artificial Sequence: Synthetic oligonucleotide
  misc_feature 1..20: note = Target: ANGPTL4; (-) strand; PAM type: NRG; PAM sequence: GGG
  source 1..20: mol_type = other DNA
aagggttgggtggcctggct

SEQ ID NO: 7729 - DNA, 20 bp, synthetic construct
  misc_feature 1..20: note = Description of Artificial Sequence: Synthetic oligonucleotide
  misc_feature 1..20: note = Target: ANGPTL4; (-) strand; PAM type: NRG; PAM sequence: TGG
  source 1..20: mol_type = other DNA
gaagggttgggtggcctggc

SEQ ID NO: 7730 - DNA, 20 bp, synthetic construct
  misc_feature 1..20: note = Description of Artificial Sequence: Synthetic oligonucleotide
  misc_feature 1..20: note = Target: ANGPTL4; (-) strand; PAM type: NRG; PAM sequence: TGG
  source 1..20: mol_type = other DNA
aggagaagggttgggtggcc

SEQ ID NO: 7731 - DNA, 20 bp, synthetic construct
  misc_feature 1..20: note = Description of Artificial Sequence: Synthetic oligonucleotide
  misc_feature 1..20: note = Target: ANGPTL4; (-) strand; PAM type: NRG; PAM sequence: TGG
  source 1..20: mol_type = other DNA
tgcagaggagaagggttggg

SEQ ID NO: 7732 - DNA, 20 bp, synthetic construct
  misc_feature 1..20: note = Description of Artificial Sequence: Synthetic oligonucleotide
  misc_feature 1..20: note = Target: ANGPTL4; (-) strand; PAM type: NRG; PAM sequence: GGG
  source 1..20: mol_type = other DNA
gcttgcagaggagaagggtt

SEQ ID NO: 7733 - DNA, 20 bp, synthetic construct
  misc_feature 1..20: note = Description of Artificial Sequence: Synthetic oligonucleotide
  misc_feature 1..20: note = Target: ANGPTL4; (-) strand; PAM type: NRG; PAM sequence: TGG
  source 1..20: mol_type = other DNA
ggcttgcagaggagaagggt

SEQ ID NO: 7734 - DNA, 20 bp, synthetic construct
  misc_feature 1..20: note = Description of Artificial Sequence: Synthetic oligonucleotide
  misc_feature 1..20: note = Target: ANGPTL4; (-) strand; PAM type: NRG; PAM sequence: GGG
  source 1..20: mol_type = other DNA
cactggcttgcagaggagaa

SEQ ID NO: 7735 - DNA, 20 bp, synthetic construct
  misc_feature 1..20: note = Description of Artificial Sequence: Synthetic oligonucleotide
  misc_feature 1..20: note = Target: ANGPTL4; (-) strand; PAM type: NRG; PAM sequence: AGG
  source 1..20: mol_type = other DNA
ccactggcttgcagaggaga

SEQ ID NO: 7736 - DNA, 20 bp, synthetic construct
  misc_feature 1..20: note = Description of Artificial Sequence: Synthetic oligonucleotide
  misc_feature 1..20: note = Target: ANGPTL4; (-) strand; PAM type: NRG; PAM sequence: AAG
  source 1..20: mol_type = other DNA
cccactggcttgcagaggag

SEQ ID NO: 7737 - DNA, 20 bp, synthetic construct
  misc_feature 1..20: note = Description of Artificial Sequence: Synthetic oligonucleotide
  misc_feature 1..20: note = Target: ANGPTL4; (-) strand; PAM type: NRG; PAM sequence: GAG
  source 1..20: mol_type = other DNA
cagcccactggcttgcagag

SEQ ID NO: 7738 - DNA, 20 bp, synthetic construct
  misc_feature 1..20: note = Description of Artificial Sequence: Synthetic oligonucleotide
  misc_feature 1..20: note = Target: ANGPTL4; (-) strand; PAM type: NRG; PAM sequence: AGG
  source 1..20: mol_type = other DNA
gacagcccactggcttgcag

SEQ ID NO: 7739 - DNA, 20 bp, synthetic construct
  misc_feature 1..20: note = Description of Artificial Sequence: Synthetic oligonucleotide
  misc_feature 1..20: note = Target: ANGPTL4; (-) strand; PAM type: NRG; PAM sequence: GAG
  source 1..20: mol_type = other DNA
ggacagcccactggcttgca

SEQ ID NO: 7740 - DNA, 20 bp, synthetic construct
  misc_feature 1..20: note = Description of Artificial Sequence: Synthetic oligonucleotide
  misc_feature 1..20: note = Target: ANGPTL4; (-) strand; PAM type: NRG; PAM sequence: CAG
  source 1..20: mol_type = other DNA
agggacagcccactggcttg

SEQ ID NO: 7741 - DNA, 20 bp, synthetic construct
  misc_feature 1..20: note = Description of Artificial Sequence: Synthetic oligonucleotide
  misc_feature 1..20: note = Target: ANGPTL4; (-) strand; PAM type: NRG; PAM sequence: TGG
  source 1..20: mol_type = other DNA
gggcttcagggacagcccac

SEQ ID NO: 7742 - DNA, 20 bp, synthetic construct
  misc_feature 1..20: note = Description of Artificial Sequence: Synthetic oligonucleotide
  misc_feature 1..20: note = Target: ANGPTL4; (-) strand; PAM type: NRG; PAM sequence: CAG
  source 1..20: mol_type = other DNA
gatcagcagggcttcaggga

SEQ ID NO: 7743 - DNA, 20 bp, synthetic construct
  misc_feature 1..20: note = Description of Artificial Sequence: Synthetic oligonucleotide
  misc_feature 1..20: note = Target: ANGPTL4; (-) strand; PAM type: NRG; PAM sequence: GGG
  source 1..20: mol_type = other DNA
cagtgatcagcagggcttca

SEQ ID NO: 7744 - DNA, 20 bp, synthetic construct
  misc_feature 1..20: note = Description of Artificial Sequence: Synthetic oligonucleotide
  misc_feature 1..20: note = Target: ANGPTL4; (-) strand; PAM type: NRG; PAM sequence: AGG
  source 1..20: mol_type = other DNA
tcagtgatcagcagggcttc

SEQ ID NO: 7745 - DNA, 20 bp, synthetic construct
  misc_feature 1..20: note = Description of Artificial Sequence: Synthetic oligonucleotide
  misc_feature 1..20: note = Target: ANGPTL4; (-) strand; PAM type: NRG; PAM sequence: CAG
  source 1..20: mol_type = other DNA
atcagtgatcagcagggctt

SEQ ID NO: 7746 - DNA, 20 bp, synthetic construct
  misc_feature 1..20: note = Description of Artificial Sequence: Synthetic oligonucleotide
  misc_feature 1..20: note = Target: ANGPTL4; (-) strand; PAM type: NRG; PAM sequence: GGG
  source 1..20: mol_type = other DNA
gttccaatcagtgatcagca

SEQ ID NO: 7747 - DNA, 20 bp, synthetic construct
  misc_feature 1..20: note = Description of Artificial Sequence: Synthetic oligonucleotide
  misc_feature 1..20: note = Target: ANGPTL4; (-) strand; PAM type: NRG; PAM sequence: AGG
  source 1..20: mol_type = other DNA
tgttccaatcagtgatcagc

SEQ ID NO: 7748 - DNA, 20 bp, synthetic construct
  misc_feature 1..20: note = Description of Artificial Sequence: Synthetic oligonucleotide
  misc_feature 1..20: note = Target: ANGPTL4; (-) strand; PAM type: NRG; PAM sequence: CAG
  source 1..20: mol_type = other DNA
ctgttccaatcagtgatcag

SEQ ID NO: 7749 - DNA, 20 bp, synthetic construct
  misc_feature 1..20: note = Description of Artificial Sequence: Synthetic oligonucleotide
  misc_feature 1..20: note = Target: ANGPTL4; (-) strand; PAM type: NRG; PAM sequence: CAG
  source 1..20: mol_type = other DNA
cctctgttccaatcagtgat

SEQ ID NO: 7750 - DNA, 20 bp, synthetic construct
  misc_feature 1..20: note = Description of Artificial Sequence: Synthetic oligonucleotide
  misc_feature 1..20: note = Target: ANGPTL4; (-) strand; PAM type: NRG; PAM sequence: CAG
  source 1..20: mol_type = other DNA
ttctccacctctgttccaat

SEQ ID NO: 7751 - DNA, 20 bp, synthetic construct
  misc_feature 1..20: note = Description of Artificial Sequence: Synthetic oligonucleotide
  misc_feature 1..20: note = Target: ANGPTL4; (-) strand; PAM type: NRG; PAM sequence: AAG
  source 1..20: mol_type = other DNA
ccctgcagctcaagtccctc

SEQ ID NO: 7752 - DNA, 20 bp, synthetic construct
  misc_feature 1..20: note = Description of Artificial Sequence: Synthetic oligonucleotide
  misc_feature 1..20: note = Target: ANGPTL4; (-) strand; PAM type: NRG; PAM sequence: AAG
  source 1..20: mol_type = other DNA
ctccagcacccctgcagctc

SEQ ID NO: 7753 - DNA, 20 bp, synthetic construct
  misc_feature 1..20: note = Description of Artificial Sequence: Synthetic oligonucleotide
  misc_feature 1..20: note = Target: ANGPTL4; (-) strand; PAM type: NRG; PAM sequence: CAG
  source 1..20: mol_type = other DNA
taccttctccagcacccctg

SEQ ID NO: 7754 - DNA, 20 bp, synthetic construct
  misc_feature 1..20: note = Description of Artificial Sequence: Synthetic oligonucleotide
  misc_feature 1..20: note = Target: ANGPTL4; (-) strand; PAM type: NRG; PAM sequence: CAG
  source 1..20: mol_type = other DNA
aaccccatttctaccttctc

SEQ ID NO: 7755 - DNA, 20 bp, synthetic construct
  misc_feature 1..20: note = Description of Artificial Sequence: Synthetic oligonucleotide
  misc_feature 1..20: note = Target: ANGPTL4; (-) strand; PAM type: NRG; PAM sequence: TGG
  source 1..20: mol_type = other DNA
gaaggttctaaccttcagga

SEQ ID NO: 7756 - DNA, 20 bp, synthetic construct
  misc_feature 1..20: note = Description of Artificial Sequence: Synthetic oligonucleotide
  misc_feature 1..20: note = Target: ANGPTL4; (-) strand; PAM type: NRG; PAM sequence: AGG
  source 1..20: mol_type = other DNA
cctagaaggttctaaccttc

SEQ ID NO: 7757 - DNA, 20 bp, synthetic construct
  misc_feature 1..20: note = Description of Artificial Sequence: Synthetic oligonucleotide
  misc_feature 1..20: note = Target: ANGPTL4; (-) strand; PAM type: NRG; PAM sequence: CAG
  source 1..20: mol_type = other DNA
ccctagaaggttctaacctt

SEQ ID NO: 7758 - DNA, 20 bp, synthetic construct
  misc_feature 1..20: note = Description of Artificial Sequence: Synthetic oligonucleotide
  misc_feature 1..20: note = Target: ANGPTL4; (-) strand; PAM type: NRG; PAM sequence: AGG
  source 1..20: mol_type = other DNA
ccatgacaccctcccctaga

SEQ ID NO: 7759 - DNA, 20 bp, synthetic construct
  misc_feature 1..20: note = Description of Artificial Sequence: Synthetic oligonucleotide
  misc_feature 1..20: note = Target: ANGPTL4; (-) strand; PAM type: NRG; PAM sequence: AAG
  source 1..20: mol_type = other DNA
tccatgacaccctcccctag

SEQ ID NO: 7760 - DNA, 20 bp, synthetic construct
  misc_feature 1..20: note = Description of Artificial Sequence: Synthetic oligonucleotide
  misc_feature 1..20: note = Target: ANGPTL4; (-) strand; PAM type: NRG; PAM sequence: TAG
  source 1..20: mol_type = other DNA
tcctccatgacaccctcccc

SEQ ID NO: 7761 - DNA, 20 bp, synthetic construct
  misc_feature 1..20: note = Description of Artificial Sequence: Synthetic oligonucleotide
  misc_feature 1..20: note = Target: ANGPTL4; (-) strand; PAM type: NRG; PAM sequence: TGG
  source 1..20: mol_type = other DNA
aatctacaaacactactacc

SEQ ID NO: 7762 - DNA, 20 bp, synthetic construct
  misc_feature 1..20: note = Description of Artificial Sequence: Synthetic oligonucleotide
  misc_feature 1..20: note = Target: ANGPTL4; (-) strand; PAM type: NRG; PAM sequence: GGG
  source 1..20: mol_type = other DNA
ataccccaagacattgtgga

SEQ ID NO: 7763 - DNA, 20 bp, synthetic construct
  misc_feature 1..20: note = Description of Artificial Sequence: Synthetic oligonucleotide
  misc_feature 1..20: note = Target: ANGPTL4; (-) strand; PAM type: NRG; PAM sequence: AGG
  source 1..20: mol_type = other DNA
cataccccaagacattgtgg

SEQ ID NO: 7764 - DNA, 20 bp, synthetic construct
  misc_feature 1..20: note = Description of Artificial Sequence: Synthetic oligonucleotide
  misc_feature 1..20: note = Target: ANGPTL4; (-) strand; PAM type: NRG; PAM sequence: GAG
  source 1..20: mol_type = other DNA
acataccccaagacattgtg

SEQ ID NO: 7765 - DNA, 20 bp, synthetic construct
  misc_feature 1..20: note = Description of Artificial Sequence: Synthetic oligonucleotide
  misc_feature 1..20: note = Target: ANGPTL4; (-) strand; PAM type: NRG; PAM sequence: TGG
  source 1..20: mol_type = other DNA
ccacataccccaagacattg

SEQ ID NO: 7766 - DNA, 20 bp, synthetic construct
  misc_feature 1..20: note = Description of Artificial Sequence: Synthetic oligonucleotide
  misc_feature 1..20: note = Target: ANGPTL4; (-) strand; PAM type: NRG; PAM sequence: AAG
  source 1..20: mol_type = other DNA
ccctaattcccacatacccc

SEQ ID NO: 7767 - DNA, 20 bp, synthetic construct
  misc_feature 1..20: note = Description of Artificial Sequence: Synthetic oligonucleotide
  misc_feature 1..20: note = Target: ANGPTL4; (-) strand; PAM type: NRG; PAM sequence: CAG
  source 1..20: mol_type = other DNA
gtctgggagctgggggttcc

SEQ ID NO: 7768 - DNA, 20 bp, synthetic construct
  misc_feature 1..20: note = Description of Artificial Sequence: Synthetic oligonucleotide
  misc_feature 1..20: note = Target: ANGPTL4; (-) strand; PAM type: NRG; PAM sequence: GGG
  source 1..20: mol_type = other DNA
gtttctggtctgggagctgg

SEQ ID NO: 7769 - DNA, 20 bp, synthetic construct
  misc_feature 1..20: note = Description of Artificial Sequence: Synthetic oligonucleotide
  misc_feature 1..20: note = Target: ANGPTL4; (-) strand; PAM type: NRG; PAM sequence: GGG
  source 1..20: mol_type = other DNA
tgtttctggtctgggagctg

SEQ ID NO: 7770 - DNA, 20 bp, synthetic construct
  misc_feature 1..20: note = Description of Artificial Sequence: Synthetic oligonucleotide
  misc_feature 1..20: note = Target: ANGPTL4; (-) strand; PAM type: NRG; PAM sequence: GGG
  source 1..20: mol_type = other DNA
gtgtttctggtctgggagct

SEQ ID NO: 7771 - DNA, 20 bp, synthetic construct
  misc_feature 1..20: note = Description of Artificial Sequence: Synthetic oligonucleotide
  misc_feature 1..20: note = Target: ANGPTL4; (-) strand; PAM type: NRG; PAM sequence: TGG
  source 1..20: mol_type = other DNA
agtgtttctggtctgggagc

SEQ ID NO: 7772 - DNA, 20 bp, synthetic construct
  misc_feature 1..20: note = Description of Artificial Sequence: Synthetic oligonucleotide
  misc_feature 1..20: note = Target: ANGPTL4; (-) strand; PAM type: NRG; PAM sequence: GAG
  source 1..20: mol_type = other DNA
caagagtgtttctggtctgg

SEQ ID NO: 7773 - DNA, 20 bp, synthetic construct
  misc_feature 1..20: note = Description of Artificial Sequence: Synthetic oligonucleotide
  misc_feature 1..20: note = Target: ANGPTL4; (-) strand; PAM type: NRG; PAM sequence: GGG
  source 1..20: mol_type = other DNA
tacaagagtgtttctggtct

SEQ ID NO: 7774 - DNA, 20 bp, synthetic construct
  misc_feature 1..20: note = Description of Artificial Sequence: Synthetic oligonucleotide
  misc_feature 1..20: note = Target: ANGPTL4; (-) strand; PAM type: NRG; PAM sequence: TGG
  source 1..20: mol_type = other DNA
atacaagagtgtttctggtc

SEQ ID NO: 7775 - DNA, 20 bp, synthetic construct
  misc_feature 1..20: note = Description of Artificial Sequence: Synthetic oligonucleotide
  misc_feature 1..20: note = Target: ANGPTL4; (-) strand; PAM type: NRG; PAM sequence: TGG
  source 1..20: mol_type = other DNA
gtaagatacaagagtgtttc

SEQ ID NO: 7776 - DNA, 20 bp, synthetic construct
  misc_feature 1..20: note = Description of Artificial Sequence: Synthetic oligonucleotide
  misc_feature 1..20: note = Target: ANGPTL4; (-) strand; PAM type: NRG; PAM sequence: GAG
  source 1..20: mol_type = other DNA
attggatttgtaagatacaa

SEQ ID NO: 7777 - DNA, 20 bp, synthetic construct
  misc_feature 1..20: note = Description of Artificial Sequence: Synthetic oligonucleotide
  misc_feature 1..20: note = Target: ANGPTL4; (-) strand; PAM type: NRG; PAM sequence: AAG
  source 1..20: mol_type = other DNA
gcattggatttgtaagatac

SEQ ID NO: 7778 - DNA, 20 bp, synthetic construct
  misc_feature 1..20: note = Description of Artificial Sequence: Synthetic oligonucleotide
  misc_feature 1..20: note = Target: ANGPTL4; (-) strand; PAM type: NRG; PAM sequence: AAG
  source 1..20: mol_type = other DNA
acctggagcattggatttgt

SEQ ID NO: 7779 - DNA, 20 bp, synthetic construct
  misc_feature 1..20: note = Description of Artificial Sequence: Synthetic oligonucleotide
  misc_feature 1..20: note = Target: ANGPTL4; (-) strand; PAM type: NRG; PAM sequence: TGG
  source 1..20: mol_type = other DNA
gggtcagggacctggagcat

SEQ ID NO: 7780 - DNA, 20 bp, synthetic construct
  misc_feature 1..20: note = Description of Artificial Sequence: Synthetic oligonucleotide
  misc_feature 1..20: note = Target: ANGPTL4; (-) strand; PAM type: NRG; PAM sequence: GAG
  source 1..20: mol_type = other DNA
gaagaggggtcagggacctg

SEQ ID NO: 7781 - DNA, 20 bp, synthetic construct
  misc_feature 1..20: note = Description of Artificial Sequence: Synthetic oligonucleotide
  misc_feature 1..20: note = Target: ANGPTL4; (-) strand; PAM type: NRG; PAM sequence: TGG
  source 1..20: mol_type = other DNA
aggaagaggggtcagggacc

SEQ ID NO: 7782 - DNA, 20 bp, synthetic construct
  misc_feature 1..20: note = Description of Artificial Sequence: Synthetic oligonucleotide
  misc_feature 1..20: note = Target: ANGPTL4; (-) strand; PAM type: NRG; PAM sequence: GGG
  source 1..20: mol_type = other DNA
ggaaggaggaagaggggtca

SEQ ID NO: 7783 - DNA, 20 bp, synthetic construct
  misc_feature 1..20: note = Description of Artificial Sequence: Synthetic oligonucleotide
  misc_feature 1..20: note = Target: ANGPTL4; (-) strand; PAM type: NRG; PAM sequence: AGG
  source 1..20: mol_type = other DNA
aggaaggaggaagaggggtc

SEQ ID NO: 7784 - DNA, 20 bp, synthetic construct
  misc_feature 1..20: note = Description of Artificial Sequence: Synthetic oligonucleotide
  misc_feature 1..20: note = Target: ANGPTL4; (-) strand; PAM type: NRG; PAM sequence: CAG
  source 1..20: mol_type = other DNA
gaggaaggaggaagaggggt

SEQ ID NO: 7785 - DNA, 20 bp, synthetic construct
  misc_feature 1..20: note = Description of Artificial Sequence: Synthetic oligonucleotide
  misc_feature 1..20: note = Target: ANGPTL4; (-) strand; PAM type: NRG; PAM sequence: GGG
  source 1..20: mol_type = other DNA
aagagaggaaggaggaagag

SEQ ID NO: 7786 - DNA, 20 bp, synthetic construct
  misc_feature 1..20: note = Description of Artificial Sequence: Synthetic oligonucleotide
  misc_feature 1..20: note = Target: ANGPTL4; (-) strand; PAM type: NRG; PAM sequence: GGG
  source 1..20: mol_type = other DNA
caagagaggaaggaggaaga

SEQ ID NO: 7787 - DNA, 20 bp, synthetic construct
  misc_feature 1..20: note = Description of Artificial Sequence: Synthetic oligonucleotide
  misc_feature 1..20: note = Target: ANGPTL4; (-) strand; PAM type: NRG; PAM sequence: AGG
  source 1..20: mol_type = other DNA
acaagagaggaaggaggaag

SEQ ID NO: 7788 - DNA, 20 bp, synthetic construct
  misc_feature 1..20: note = Description of Artificial Sequence: Synthetic oligonucleotide
  misc_feature 1..20: note = Target: ANGPTL4; (-) strand; PAM type: NRG; PAM sequence: GAG
  source 1..20: mol_type = other DNA
aacaagagaggaaggaggaa

SEQ ID NO: 7789 - DNA, 20 bp, synthetic construct
  misc_feature 1..20: note = Description of Artificial Sequence: Synthetic oligonucleotide
  misc_feature 1..20: note = Target: ANGPTL4; (-) strand; PAM type: NRG; PAM sequence: AAG
  source 1..20: mol_type = other DNA
agaacaagagaggaaggagg

SEQ ID NO: 7790 - DNA, 20 bp, synthetic construct
  misc_feature 1..20: note = Description of Artificial Sequence: Synthetic oligonucleotide
  misc_feature 1..20: note = Target: ANGPTL4; (-) strand; PAM type: NRG; PAM sequence: AGG
  source 1..20: mol_type = other DNA
aggagaacaagagaggaagg

SEQ ID NO: 7791 - DNA, 20 bp, synthetic construct
  misc_feature 1..20: note = Description of Artificial Sequence: Synthetic oligonucleotide
  misc_feature 1..20: note = Target: ANGPTL4; (-) strand; PAM type: NRG; PAM sequence: GAG
  source 1..20: mol_type = other DNA
gaggagaacaagagaggaag

SEQ ID NO: 7792 - DNA, 20 bp, synthetic construct
  misc_feature 1..20: note = Description of Artificial Sequence: Synthetic oligonucleotide
  misc_feature 1..20: note = Target: ANGPTL4; (-) strand; PAM type: NRG; PAM sequence: AGG
  source 1..20: mol_type = other DNA
aggaggagaacaagagagga

SEQ ID NO: 7793 - DNA, 20 bp, synthetic construct
  misc_feature 1..20: note = Description of Artificial Sequence: Synthetic oligonucleotide
  misc_feature 1..20: note = Target: ANGPTL4; (-) strand; PAM type: NRG; PAM sequence: AAG
  source 1..20: mol_type = other DNA
gaggaggagaacaagagagg

SEQ ID NO: 7794 - DNA, 20 bp, synthetic construct
  misc_feature 1..20: note = Description of Artificial Sequence: Synthetic oligonucleotide
  misc_feature 1..20: note = Target: ANGPTL4; (-) strand; PAM type: NRG; PAM sequence: AGG
  source 1..20: mol_type = other DNA
agggaggaggagaacaagag

SEQ ID NO: 7795 - DNA, 20 bp, synthetic construct
  misc_feature 1..20: note = Description of Artificial Sequence: Synthetic oligonucleotide
  misc_feature 1..20: note = Target: ANGPTL4; (-) strand; PAM type: NRG; PAM sequence: GAG
  source 1..20: mol_type = other DNA
gagggaggaggagaacaaga

SEQ ID NO: 7796 - DNA, 20 bp, synthetic construct
  misc_feature 1..20: note = Description of Artificial Sequence: Synthetic oligonucleotide
  misc_feature 1..20: note = Target: ANGPTL4; (-) strand; PAM type: NRG; PAM sequence: GAG
  source 1..20: mol_type = other DNA
gggagggaggaggagaacaa

SEQ ID NO: 7797 - DNA, 20 bp, synthetic construct
  misc_feature 1..20: note = Description of Artificial Sequence: Synthetic oligonucleotide
  misc_feature 1..20: note = Target: ANGPTL4; (-) strand; PAM type: NRG; PAM sequence: AAG
  source 1..20: mol_type = other DNA
cggggagggaggaggagaac

SEQ ID NO: 7798 - DNA, 20 bp, synthetic construct
  misc_feature 1..20: note = Description of Artificial Sequence: Synthetic oligonucleotide
  misc_feature 1..20: note = Target: ANGPTL4; (-) strand; PAM type: NRG; PAM sequence: GAG
  source 1..20: mol_type = other DNA
cgggggcggggagggaggag

SEQ ID NO: 7799 - DNA, 20 bp, synthetic construct
  misc_feature 1..20: note = Description of Artificial Sequence: Synthetic oligonucleotide
  misc_feature 1..20: note = Target: ANGPTL4; (-) strand; PAM type: NRG; PAM sequence: AGG
  source 1..20: mol_type = other DNA
ggcgggggcggggagggagg

SEQ ID NO: 7800 - DNA, 20 bp, synthetic construct
  misc_feature 1..20: note = Description of Artificial Sequence: Synthetic oligonucleotide
  misc_feature 1..20: note = Target: ANGPTL4; (-) strand; PAM type: NRG; PAM sequence: GAG
  source 1..20: mol_type = other DNA
cggcgggggcggggagggag

SEQ ID NO: 7801 - DNA, 20 bp, synthetic construct
  misc_feature 1..20: note = Description of Artificial Sequence: Synthetic oligonucleotide
  misc_feature 1..20: note = Target: ANGPTL4; (-) strand; PAM type: NRG; PAM sequence: AGG
  source 1..20: mol_type = other DNA
gccggcgggggcggggaggg

SEQ ID NO: 7802 - DNA, 20 bp, synthetic construct
  misc_feature 1..20: note = Description of Artificial Sequence: Synthetic oligonucleotide
  misc_feature 1..20: note = Target: ANGPTL4; (-) strand; PAM type: NRG; PAM sequence: GAG
  source 1..20: mol_type = other DNA
ggccggcgggggcggggagg

SEQ ID NO: 7803 - DNA, 20 bp, synthetic construct
  misc_feature 1..20: note = Description of Artificial Sequence: Synthetic oligonucleotide
  misc_feature 1..20: note = Target: ANGPTL4; (-) strand; PAM type: NRG; PAM sequence: GGG
  source 1..20: mol_type = other DNA
ggggccggcgggggcgggga

SEQ ID NO: 7804 - DNA, 20 bp, synthetic construct
  misc_feature 1..20: note = Description of Artificial Sequence: Synthetic oligonucleotide
  misc_feature 1..20: note = Target: ANGPTL4; (-) strand; PAM type: NRG; PAM sequence: AGG
  source 1..20: mol_type = other DNA
gggggccggcgggggcgggg

SEQ ID NO: 7805 - DNA, 20 bp, synthetic construct
  misc_feature 1..20: note = Description of Artificial Sequence: Synthetic oligonucleotide
  misc_feature 1..20: note = Target: ANGPTL4; (-) strand; PAM type: NRG; PAM sequence: GAG
  source 1..20: mol_type = other DNA
agggggccggcgggggcggg

SEQ ID NO: 7806 - DNA, 20 bp, synthetic construct
  misc_feature 1..20: note = Description of Artificial Sequence: Synthetic oligonucleotide
  misc_feature 1..20: note = Target: ANGPTL4; (-) strand; PAM type: NRG; PAM sequence: GGG
  source 1..20: mol_type = other DNA
ggagggggccggcgggggcg

SEQ ID NO: 7807 - DNA, 20 bp, synthetic construct
  misc_feature 1..20: note = Description of Artificial Sequence: Synthetic oligonucleotide
  misc_feature 1..20: note = Target: ANGPTL4; (-) strand; PAM type: NRG; PAM sequence: GGG
  source 1..20: mol_type = other DNA
gggagggggccggcgggggc

SEQ ID NO: 7808 - DNA, 20 bp, synthetic construct
  misc_feature 1..20: note = Description of Artificial Sequence: Synthetic oligonucleotide
  misc_feature 1..20: note = Target: ANGPTL4; (-) strand; PAM type: NRG; PAM sequence: CGG
  source 1..20: mol_type = other DNA
ggggagggggccggcggggg

SEQ ID NO: 7809 - DNA, 20 bp, synthetic construct
  misc_feature 1..20: note = Description of Artificial Sequence: Synthetic oligonucleotide
  misc_feature 1..20: note = Target: ANGPTL4; (-) strand; PAM type: NRG; PAM sequence: GGG
  source 1..20: mol_type = other DNA
ggtggggagggggccggcgg

SEQ ID NO: 7810 - DNA, 20 bp, synthetic construct
  misc_feature 1..20: note = Description of Artificial Sequence: Synthetic oligonucleotide
  misc_feature 1..20: note = Target: ANGPTL4; (-) strand; PAM type: NRG; PAM sequence: GGG
  source 1..20: mol_type = other DNA
cggtggggagggggccggcg

SEQ ID NO: 7811 - DNA, 20 bp, synthetic construct
  misc_feature 1..20: note = Description of Artificial Sequence: Synthetic oligonucleotide
  misc_feature 1..20: note = Target: ANGPTL4; (-) strand; PAM type: NRG; PAM sequence: GGG
  source 1..20: mol_type = other DNA
gcggtggggagggggccggc

SEQ ID NO: 7812 - DNA, 20 bp, synthetic construct
  misc_feature 1..20: note = Description of Artificial Sequence: Synthetic oligonucleotide
  misc_feature 1..20: note = Target: ANGPTL4; (-) strand; PAM type: NRG; PAM sequence: CGG
  source 1..20: mol_type = other DNA
tgcggtggggagggggccgg

SEQ ID NO: 7813 - DNA, 20 bp, synthetic construct
  misc_feature 1..20: note = Description of Artificial Sequence: Synthetic oligonucleotide
  misc_feature 1..20: note = Target: ANGPTL4; (-) strand; PAM type: NRG; PAM sequence: CGG
  source 1..20: mol_type = other DNA
ttctgcggtggggagggggc

SEQ ID NO: 7814 - DNA, 20 bp, synthetic construct
  misc_feature 1..20: note = Description of Artificial Sequence: Synthetic oligonucleotide
  misc_feature 1..20: note = Target: ANGPTL4; (-) strand; PAM type: NRG; PAM sequence: GGG
  source 1..20: mol_type = other DNA
cactttctgcggtggggagg

SEQ ID NO: 7815 - DNA, 20 bp, synthetic construct
  misc_feature 1..20: note = Description of Artificial Sequence: Synthetic oligonucleotide
  misc_feature 1..20: note = Target: ANGPTL4; (-) strand; PAM type: NRG; PAM sequence: GGG
  source 1..20: mol_type = other DNA
ccactttctgcggtggggag

SEQ ID NO: 7816 - DNA, 20 bp, synthetic construct
  misc_feature 1..20: note = Description of Artificial Sequence: Synthetic oligonucleotide
  misc_feature 1..20: note = Target: ANGPTL4; (-) strand; PAM type: NRG; PAM sequence: GGG
  source 1..20: mol_type = other DNA
cccactttctgcggtgggga

SEQ ID NO: 7817 - DNA, 20 bp, synthetic construct
  misc_feature 1..20: note = Description of Artificial Sequence: Synthetic oligonucleotide
  misc_feature 1..20: note = Target: ANGPTL4; (-) strand; PAM type: NRG; PAM sequence: AGG
  source 1..20: mol_type = other DNA
gcccactttctgcggtgggg

SEQ ID NO: 7818 - DNA, 20 bp, synthetic construct
  misc_feature 1..20: note = Description of Artificial Sequence: Synthetic oligonucleotide
  misc_feature 1..20: note = Target: ANGPTL4; (-) strand; PAM type: NRG; PAM sequence: GAG
  source 1..20: mol_type = other DNA
agcccactttctgcggtggg

SEQ ID NO: 7819 - DNA, 20 bp, synthetic construct
  misc_feature 1..20: note = Description of Artificial Sequence: Synthetic oligonucleotide
  misc_feature 1..20: note = Target: ANGPTL4; (-) strand; PAM type: NRG; PAM sequence: GGG
  source 1..20: mol_type = other DNA
aaagcccactttctgcggtg

SEQ ID NO: 7820 - DNA, 20 bp, synthetic construct
  misc_feature 1..20: note = Description of Artificial Sequence: Synthetic oligonucleotide
  misc_feature 1..20: note = Target: ANGPTL4; (-) strand; PAM type: NRG; PAM sequence: GGG
  source 1..20: mol_type = other DNA
aaaagcccactttctgcggt

SEQ ID NO: 7821 - DNA, 20 bp, synthetic construct
  misc_feature 1..20: note = Description of Artificial Sequence: Synthetic oligonucleotide
  misc_feature 1..20: note = Target: ANGPTL4; (-) strand; PAM type: NRG; PAM sequence: TGG
  source 1..20: mol_type = other DNA
caaaagcccactttctgcgg

SEQ ID NO: 7822 - DNA, 20 bp, synthetic construct
  misc_feature 1..20: note = Description of Artificial Sequence: Synthetic oligonucleotide
  misc_feature 1..20: note = Target: ANGPTL4; (-) strand; PAM type: NRG; PAM sequence: CGG
  source 1..20: mol_type = other DNA
cagcaaaagcccactttctg

SEQ ID NO: 7823 - DNA, 20 bp, synthetic construct
  misc_feature 1..20: note = Description of Artificial Sequence: Synthetic oligonucleotide
  misc_feature 1..20: note = Target: ANGPTL4; (-) strand; PAM type: NRG; PAM sequence: AAG
  source 1..20: mol_type = other DNA
acaacttgtggtggcagcaa

SEQ ID NO: 7824 - DNA, 20 bp, synthetic construct
  misc_feature 1..20: note = Description of Artificial Sequence: Synthetic oligonucleotide
  misc_feature 1..20: note = Target: ANGPTL4; (-) strand; PAM type: NRG; PAM sequence: CAG
  source 1..20: mol_type = other DNA
gcacctacaacttgtggtgg

SEQ ID NO: 7825 - DNA, 20 bp, synthetic construct
  misc_feature 1..20: note = Description of Artificial Sequence: Synthetic oligonucleotide
  misc_feature 1..20: note = Target: ANGPTL4; (-) strand; PAM type: NRG; PAM sequence: TGG
  source 1..20: mol_type = other DNA
aaagcacctacaacttgtgg

SEQ ID NO: 7826 - DNA, 20 bp, synthetic construct
  misc_feature 1..20: note = Description of Artificial Sequence: Synthetic oligonucleotide
  misc_feature 1..20: note = Target: ANGPTL4; (-) strand; PAM type: NRG; PAM sequence: TGG
  source 1..20: mol_type = other DNA
aataaagcacctacaacttg

SEQ ID NO: 7827 - DNA, 20 bp, synthetic construct
  misc_feature 1..20: note = Description of Artificial Sequence: Synthetic oligonucleotide
  misc_feature 1..20: note = Target: ANGPTL4; (-) strand; PAM type: NRG; PAM sequence: AAG
  source 1..20: mol_type = other DNA
tgaacggagatttgggaata

SEQ ID NO: 7828 - DNA, 20 bp, synthetic construct
  misc_feature 1..20: note = Description of Artificial Sequence: Synthetic oligonucleotide
  misc_feature 1..20: note = Target: ANGPTL4; (-) strand; PAM type: NRG; PAM sequence: GGG
  source 1..20: mol_type = other DNA
ttcgagatgaacggagattt

SEQ ID NO: 7829 - DNA, 20 bp, synthetic construct
  misc_feature 1..20: note = Description of Artificial Sequence: Synthetic oligonucleotide
  misc_feature 1..20: note = Target: ANGPTL4; (-) strand; PAM type: NRG; PAM sequence: TGG
  source 1..20: mol_type = other DNA
gttcgagatgaacggagatt

SEQ ID NO: 7830 - DNA, 20 bp, synthetic construct
  misc_feature 1..20: note = Description of Artificial Sequence: Synthetic oligonucleotide
  misc_feature 1..20: note = Target: ANGPTL4; (-) strand; PAM type: NRG; PAM sequence: GAG
  source 1..20: mol_type = other DNA
gctgtggttcgagatgaacg

SEQ ID NO: 7831 - DNA, 20 bp, synthetic construct
  misc_feature 1..20: note = Description of Artificial Sequence: Synthetic oligonucleotide
  misc_feature 1..20: note = Target: ANGPTL4; (-) strand; PAM type: NRG; PAM sequence: CGG
  source 1..20: mol_type = other DNA
atgctgtggttcgagatgaa

SEQ ID NO: 7832 - DNA, 20 bp, synthetic construct
  misc_feature 1..20: note = Description of Artificial Sequence: Synthetic oligonucleotide
  misc_feature 1..20: note = Target: ANGPTL4; (-) strand; PAM type: NRG; PAM sequence: GAG
  source 1..20: mol_type = other DNA
acgtggacatgctgtggttc

SEQ ID NO: 7833 - DNA, 20 bp, synthetic construct
  misc_feature 1..20: note = Description of Artificial Sequence: Synthetic oligonucleotide
  misc_feature 1..20: note = Target: ANGPTL4; (-) strand; PAM type: NRG; PAM sequence: TGG
  source 1..20: mol_type = other DNA
ggacacacgtggacatgctg

SEQ ID NO: 7834 - DNA, 20 bp, synthetic construct
  misc_feature 1..20: note = Description of Artificial Sequence: Synthetic oligonucleotide
  misc_feature 1..20: note = Target: ANGPTL4; (-) strand; PAM type: NRG; PAM sequence: TGG
  source 1..20: mol_type = other DNA
gagtctgcatcggacacacg

SEQ ID NO: 7835 - DNA, 20 bp, synthetic construct
  misc_feature 1..20: note = Description of Artificial Sequence: Synthetic oligonucleotide
  misc_feature 1..20: note = Target: ANGPTL4; (-) strand; PAM type: NRG; PAM sequence: CGG
  source 1..20: mol_type = other DNA
agagaaccgcgagtctgcat

SEQ ID NO: 7836 - DNA, 20 bp, synthetic construct
  misc_feature 1..20: note = Description of Artificial Sequence: Synthetic oligonucleotide
  misc_feature 1..20: note = Target: ANGPTL4; (-) strand; PAM type: NRG; PAM sequence: GAG
  source 1..20: mol_type = other DNA
ccgtgaacttagagaaccgc

SEQ ID NO: 7837 - DNA, 20 bp, synthetic construct
  misc_feature 1..20: note = Description of Artificial Sequence: Synthetic oligonucleotide
  misc_feature 1..20: note = Target: ANGPTL4; (-) strand; PAM type: NRG; PAM sequence: GAG
  source 1..20: mol_type = other DNA
cgtgtggggccgtgaactta

SEQ ID NO: 7838 - DNA, 20 bp, synthetic construct
  misc_feature 1..20: note = Description of Artificial Sequence: Synthetic oligonucleotide
  misc_feature 1..20: note = Target: ANGPTL4; (-) strand; PAM type: NRG; PAM sequence: TAG
  source 1..20: mol_type = other DNA
accgtgtggggccgtgaact

SEQ ID NO: 7839 - DNA, 20 bp, synthetic construct
  misc_feature 1..20: note = Description of Artificial Sequence: Synthetic oligonucleotide
  misc_feature 1..20: note = Target: ANGPTL4; (-) strand; PAM type: NRG; PAM sequence: GGG
  source 1..20: mol_type = other DNA
gaccacagagaaaccgtgtg

SEQ ID NO: 7840 - DNA, 20 bp, synthetic construct
  misc_feature 1..20: note = Description of Artificial Sequence: Synthetic oligonucleotide
  misc_feature 1..20: note = Target: ANGPTL4; (-) strand; PAM type: NRG; PAM sequence: GGG
  source 1..20: mol_type = other DNA
ggaccacagagaaaccgtgt

SEQ ID NO: 7841 - DNA, 20 bp, synthetic construct
  misc_feature 1..20: note = Description of Artificial Sequence: Synthetic oligonucleotide
  misc_feature 1..20: note = Target: ANGPTL4; (-) strand; PAM type: NRG; PAM sequence: TGG
  source 1..20: mol_type = other DNA
aggaccacagagaaaccgtg

SEQ ID NO: 7842 - DNA, 20 bp, synthetic construct
  misc_feature 1..20: note = Description of Artificial Sequence: Synthetic oligonucleotide
  misc_feature 1..20: note = Target: ANGPTL4; (-) strand; PAM type: NRG; PAM sequence: GAG
  source 1..20: mol_type = other DNA
agggaaggatgaggaccaca

SEQ ID NO: 7843 - DNA, 20 bp, synthetic construct
  misc_feature 1..20: note = Description of Artificial Sequence: Synthetic oligonucleotide
  misc_feature 1..20: note = Target: ANGPTL4; (-) strand; PAM type: NRG; PAM sequence: CAG
  source 1..20: mol_type = other DNA
gcagggaaggatgaggacca

SEQ ID NO: 7844 - DNA, 20 bp, synthetic construct
  misc_feature 1..20: note = Description of Artificial Sequence: Synthetic oligonucleotide
  misc_feature 1..20: note = Target: ANGPTL4; (-) strand; PAM type: NRG; PAM sequence: AGG
  source 1..20: mol_type = other DNA
cacagatgcagggaaggatg

SEQ ID NO: 7845 - DNA, 20 bp, synthetic construct
  misc_feature 1..20: note = Description of Artificial Sequence: Synthetic oligonucleotide
  misc_feature 1..20: note = Target: ANGPTL4; (-) strand; PAM type: NRG; PAM sequence: GAG
  source 1..20: mol_type = other DNA
ccacagatgcagggaaggat

SEQ ID NO: 7846 - DNA, 20 bp, synthetic construct
  misc_feature 1..20: note = Description of Artificial Sequence: Synthetic oligonucleotide
  misc_feature 1..20: note = Target: ANGPTL4; (-) strand; PAM type: NRG; PAM sequence: AGG
  source 1..20: mol_type = other DNA
gacagccacagatgcaggga

SEQ ID NO: 7847 - DNA, 20 bp, synthetic construct
  misc_feature 1..20: note = Description of Artificial Sequence: Synthetic oligonucleotide
  misc_feature 1..20: note = Target: ANGPTL4; (-) strand; PAM type: NRG; PAM sequence: AAG
  source 1..20: mol_type = other DNA
ggacagccacagatgcaggg

SEQ ID NO: 7848 - DNA, 20 bp, synthetic construct
  misc_feature 1..20: note = Description of Artificial Sequence: Synthetic oligonucleotide
  misc_feature 1..20: note = Target: ANGPTL4; (-) strand; PAM type: NRG; PAM sequence: GGG
  source 1..20: mol_type = other DNA
tgtggacagccacagatgca

SEQ ID NO: 7849 - DNA, 20 bp, synthetic construct
  misc_feature 1..20: note = Description of Artificial Sequence: Synthetic oligonucleotide
  misc_feature 1..20: note = Target: ANGPTL4; (-) strand; PAM type: NRG; PAM sequence: AGG
  source 1..20: mol_type = other DNA
ctgtggacagccacagatgc

SEQ ID NO: 7850 - DNA, 20 bp, synthetic construct
  misc_feature 1..20: note = Description of Artificial Sequence: Synthetic oligonucleotide
  misc_feature 1..20: note = Target: ANGPTL4; (-) strand; PAM type: NRG; PAM sequence: CAG
  source 1..20: mol_type = other DNA
gctgtggacagccacagatg

SEQ ID NO: 7851 - DNA, 20 bp, synthetic construct
  misc_feature 1..20: note = Description of Artificial Sequence: Synthetic oligonucleotide
  misc_feature 1..20: note = Target: ANGPTL4; (-) strand; PAM type: NRG; PAM sequence: CAG
  source 1..20: mol_type = other DNA
cagttggctgtggacagcca

SEQ ID NO: 7852 - DNA, 20 bp, synthetic construct
  misc_feature 1..20: note = Description of Artificial Sequence: Synthetic oligonucleotide
  misc_feature 1..20: note = Target: ANGPTL4; (-) strand; PAM type: NRG; PAM sequence: CAG
  source 1..20: mol_type = other DNA
ttcacccagttggctgtgga

SEQ ID NO: 7853 - DNA, 20 bp, synthetic construct
  misc_feature 1..20: note = Description of Artificial Sequence: Synthetic oligonucleotide
  misc_feature 1..20: note = Target: ANGPTL4; (-) strand; PAM type: NRG; PAM sequence: TGG
  source 1..20: mol_type = other DNA
aactttcacccagttggctg

SEQ ID NO: 7854 - DNA, 20 bp, synthetic construct
  misc_feature 1..20: note = Description of Artificial Sequence: Synthetic oligonucleotide
  misc_feature 1..20: note = Target: ANGPTL4; (-) strand; PAM type: NRG; PAM sequence: TGG
  source 1..20: mol_type = other DNA
gatccaaactttcacccagt

SEQ ID NO: 7855 - DNA, 20 bp, synthetic construct
  misc_feature 1..20: note = Description of Artificial Sequence: Synthetic oligonucleotide
  misc_feature 1..20: note = Target: ANGPTL4; (-) strand; PAM type: NRG; PAM sequence: CAG
  source 1..20: mol_type = other DNA
gggggatccaaactttcacc

SEQ ID NO: 7856 - DNA, 20 bp, synthetic construct
  misc_feature 1..20: note = Description of Artificial Sequence: Synthetic oligonucleotide
  misc_feature 1..20: note = Target: ANGPTL4; (-) strand; PAM type: NRG; PAM sequence: GGG
  source 1..20: mol_type = other DNA
tgaccctagggtgtgagagg

SEQ ID NO: 7857 - DNA, 20 bp, synthetic construct
  misc_feature 1..20: note = Description of Artificial Sequence: Synthetic oligonucleotide
  misc_feature 1..20: note = Target: ANGPTL4; (-) strand; PAM type: NRG; PAM sequence: GGG
  source 1..20: mol_type = other DNA
ctgaccctagggtgtgagag

SEQ ID NO: 7858 - DNA, 20 bp, synthetic construct
  misc_feature 1..20: note = Description of Artificial Sequence: Synthetic oligonucleotide
  misc_feature 1..20: note = Target: ANGPTL4; (-) strand; PAM type: NRG; PAM sequence: GGG
  source 1..20: mol_type = other DNA
actgaccctagggtgtgaga

SEQ ID NO: 7859 - DNA, 20 bp, synthetic construct
  misc_feature 1..20: note = Description of Artificial Sequence: Synthetic oligonucleotide
  misc_feature 1..20: note = Target: ANGPTL4; (-) strand; PAM type: NRG; PAM sequence: AGG
  source 1..20: mol_type = other DNA
cactgaccctagggtgtgag

SEQ ID NO: 7860 - DNA, 20 bp, synthetic construct
  misc_feature 1..20: note = Description of Artificial Sequence: Synthetic oligonucleotide
  misc_feature 1..20: note = Target: ANGPTL4; (-) strand; PAM type: NRG; PAM sequence: GAG
  source 1..20: mol_type = other DNA
ccactgaccctagggtgtga

SEQ ID NO: 7861 - DNA, 20 bp, synthetic construct
  misc_feature 1..20: note = Description of Artificial Sequence: Synthetic oligonucleotide
  misc_feature 1..20: note = Target: ANGPTL4; (-) strand; PAM type: NRG; PAM sequence: GAG
  source 1..20: mol_type = other DNA
tgccactgaccctagggtgt

SEQ ID NO: 7862 - DNA, 20 bp, synthetic construct
  misc_feature 1..20: note = Description of Artificial Sequence: Synthetic oligonucleotide
  misc_feature 1..20: note = Target: ANGPTL4; (-) strand; PAM type: NRG; PAM sequence: GGG
  source 1..20: mol_type = other DNA
gaagcctgccactgacccta

SEQ ID NO: 7863 - DNA, 20 bp, synthetic construct
  misc_feature 1..20: note = Description of Artificial Sequence: Synthetic oligonucleotide
  misc_feature 1..20: note = Target: ANGPTL4; (-) strand; PAM type: NRG; PAM sequence: AGG
  source 1..20: mol_type = other DNA
ggaagcctgccactgaccct

SEQ ID NO: 7864 - DNA, 20 bp, synthetic construct
  misc_feature 1..20: note = Description of Artificial Sequence: Synthetic oligonucleotide
  misc_feature 1..20: note = Target: ANGPTL4; (-) strand; PAM type: NRG; PAM sequence: TAG
  source 1..20: mol_type = other DNA
tggaagcctgccactgaccc

SEQ ID NO: 7865 - DNA, 20 bp, synthetic construct
  misc_feature 1..20: note = Description of Artificial Sequence: Synthetic oligonucleotide
  misc_feature 1..20: note = Target: ANGPTL4; (-) strand; PAM type: NRG; PAM sequence: AAG
  source 1..20: mol_type = other DNA
cctcaggtctacagtgctgg

SEQ ID NO: 7866 - DNA, 20 bp, synthetic construct
  misc_feature 1..20: note = Description of Artificial Sequence: Synthetic oligonucleotide
  misc_feature 1..20: note = Target: ANGPTL4; (-) strand; PAM type: NRG; PAM sequence: TGG
  source 1..20: mol_type = other DNA
aaccctcaggtctacagtgc

SEQ ID NO: 7867 - DNA, 20 bp, synthetic construct
  misc_feature 1..20: note = Description of Artificial Sequence: Synthetic oligonucleotide
  misc_feature 1..20: note = Target: ANGPTL4; (-) strand; PAM type: NRG; PAM sequence: CAG
  source 1..20: mol_type = other DNA
ggagagaaccctcaggtcta

SEQ ID NO: 7868 - DNA, 20 bp, synthetic construct
  misc_feature 1..20: note = Description of Artificial Sequence: Synthetic oligonucleotide
  misc_feature 1..20: note = Target: ANGPTL4; (-) strand; PAM type: NRG; PAM sequence: AGG
  source 1..20: mol_type = other DNA
ttggggaggagagaaccctc

SEQ ID NO: 7869 - DNA, 20 bp, synthetic construct
  misc_feature 1..20: note = Description of Artificial Sequence: Synthetic oligonucleotide
  misc_feature 1..20: note = Target: ANGPTL4; (-) strand; PAM type: NRG; PAM sequence: CAG
  source 1..20: mol_type = other DNA
cttggggaggagagaaccct

SEQ ID NO: 7870 - DNA, 20 bp, synthetic construct
  misc_feature 1..20: note = Description of Artificial Sequence: Synthetic oligonucleotide
  misc_feature 1..20: note = Target: ANGPTL4; (-) strand; PAM type: NRG; PAM sequence: GAG
  source 1..20: mol_type = other DNA
gagcgggagcttggggagga

SEQ ID NO: 7871 - DNA, 20 bp, synthetic construct
  misc_feature 1..20: note = Description of Artificial Sequence: Synthetic oligonucleotide
  misc_feature 1..20: note = Target: ANGPTL4; (-) strand; PAM type: NRG; PAM sequence: GAG
  source 1..20: mol_type = other DNA
aggagcgggagcttggggag

SEQ ID NO: 7872 - DNA, 20 bp, synthetic construct
  misc_feature 1..20: note = Description of Artificial Sequence: Synthetic oligonucleotide
  misc_feature 1..20: note = Target: ANGPTL4; (-) strand; PAM type: NRG; PAM sequence: AGG
  source 1..20: mol_type = other DNA
gaaggagcgggagcttgggg

SEQ ID NO: 7873 - DNA, 20 bp, synthetic construct
  misc_feature 1..20: note = Description of Artificial Sequence: Synthetic oligonucleotide
  misc_feature 1..20: note = Target: ANGPTL4; (-) strand; PAM type: NRG; PAM sequence: GAG
  source 1..20: mol_type = other DNA
ggaaggagcgggagcttggg

SEQ ID NO: 7874 - DNA, 20 bp, synthetic construct
  misc_feature 1..20: note = Description of Artificial Sequence: Synthetic oligonucleotide
  misc_feature 1..20: note = Target: ANGPTL4; (-) strand; PAM type: NRG; PAM sequence: GGG
  source 1..20: mol_type = other DNA
tgggaaggagcgggagcttg

SEQ ID NO: 7875 - DNA, 20 bp, synthetic construct
  misc_feature 1..20: note = Description of Artificial Sequence: Synthetic oligonucleotide
  misc_feature 1..20: note = Target: ANGPTL4; (-) strand; PAM type: NRG; PAM sequence: GGG
  source 1..20: mol_type = other DNA
gtgggaaggagcgggagctt

SEQ ID NO: 7876 - DNA, 20 bp, synthetic construct
  misc_feature 1..20: note = Description of Artificial Sequence: Synthetic oligonucleotide
  misc_feature 1..20: note = Target: ANGPTL4; (-) strand; PAM type: NRG; PAM sequence: TGG
  source 1..20: mol_type = other DNA
ggtgggaaggagcgggagct

SEQ ID NO: 7877 - DNA, 20 bp, synthetic construct
  misc_feature 1..20: note = Description of Artificial Sequence: Synthetic oligonucleotide
  misc_feature 1..20: note = Target: ANGPTL4; (-) strand; PAM type: NRG; PAM sequence: GAG
  source 1..20: mol_type = other DNA
acggaggtgggaaggagcgg

SEQ ID NO: 7878 - DNA, 20 bp, synthetic construct
  misc_feature 1..20: note = Description of Artificial Sequence: Synthetic oligonucleotide
  misc_feature 1..20: note = Target: ANGPTL4; (-) strand; PAM type: NRG; PAM sequence: GGG
  source 1..20: mol_type = other DNA
gcacggaggtgggaaggagc

SEQ ID NO: 7879 - DNA, 20 bp, synthetic construct
  misc_feature 1..20: note = Description of Artificial Sequence: Synthetic oligonucleotide
  misc_feature 1..20: note = Target: ANGPTL4; (-) strand; PAM type: NRG; PAM sequence: CGG
  source 1..20: mol_type = other DNA
agcacggaggtgggaaggag

SEQ ID NO: 7880 - DNA, 20 bp, synthetic construct
  misc_feature 1..20: note = Description of Artificial Sequence: Synthetic oligonucleotide
  misc_feature 1..20: note = Target: ANGPTL4; (-) strand; PAM type: NRG; PAM sequence: GAG
  source 1..20: mol_type = other DNA
ggcagcacggaggtgggaag

SEQ ID NO: 7881 - DNA, 20 bp, synthetic construct
  misc_feature 1..20: note = Description of Artificial Sequence: Synthetic oligonucleotide
  misc_feature 1..20: note = Target: ANGPTL4; (-) strand; PAM type: NRG; PAM sequence: AGG
  source 1..20: mol_type = other DNA
cgggcagcacggaggtggga

SEQ ID NO: 7882 - DNA, 20 bp, synthetic construct
  misc_feature 1..20: note = Description of Artificial Sequence: Synthetic oligonucleotide
  misc_feature 1..20: note = Target: ANGPTL4; (-) strand; PAM type: NRG; PAM sequence: AAG
  source 1..20: mol_type = other DNA
gcgggcagcacggaggtggg

SEQ ID NO: 7883 - DNA, 20 bp, synthetic construct
  misc_feature 1..20: note = Description of Artificial Sequence: Synthetic oligonucleotide
  misc_feature 1..20: note = Target: ANGPTL4; (-) strand; PAM type: NRG; PAM sequence: GGG
  source 1..20: mol_type = other DNA
ggggcgggcagcacggaggt

SEQ ID NO: 7884 - DNA, 20 bp, synthetic construct
  misc_feature 1..20: note = Description of Artificial Sequence: Synthetic oligonucleotide
  misc_feature 1..20: note = Target: ANGPTL4; (-) strand; PAM type: NRG; PAM sequence: TGG
  source 1..20: mol_type = other DNA
gggggcgggcagcacggagg

SEQ ID NO: 7885 - DNA, 20 bp, synthetic construct
  misc_feature 1..20: note = Description of Artificial Sequence: Synthetic oligonucleotide
  misc_feature 1..20: note = Target: ANGPTL4; (-) strand; PAM type: NRG; PAM sequence: AGG
  source 1..20: mol_type = other DNA
gttgggggcgggcagcacgg

SEQ ID NO: 7886 - DNA, 20 bp, synthetic construct
  misc_feature 1..20: note = Description of Artificial Sequence: Synthetic oligonucleotide
  misc_feature 1..20: note = Target: ANGPTL4; (-) strand; PAM type: NRG; PAM sequence: GAG
  source 1..20: mol_type = other DNA
ggttgggggcgggcagcacg

SEQ ID NO: 7887 - DNA, 20 bp, synthetic construct
  misc_feature 1..20: note = Description of Artificial Sequence: Synthetic oligonucleotide
  misc_feature 1..20: note = Target: ANGPTL4; (-) strand; PAM type: NRG; PAM sequence: CGG
  source 1..20: mol_type = other DNA
ggggttgggggcgggcagca

SEQ ID NO: 7888 - DNA, 20 bp, synthetic construct
  misc_feature 1..20: note = Description of Artificial Sequence: Synthetic oligonucleotide
  misc_feature 1..20: note = Target: ANGPTL4; (-) strand; PAM type: NRG; PAM sequence: CAG
  source 1..20: mol_type = other DNA
ctggcggggttgggggcggg

SEQ ID NO: 7889 - DNA, 20 bp, synthetic construct
  misc_feature 1..20: note = Description of Artificial Sequence: Synthetic oligonucleotide
  misc_feature 1..20: note = Target: ANGPTL4; (-) strand; PAM type: NRG; PAM sequence: GGG
  source 1..20: mol_type = other DNA
agcctggcggggttgggggc

SEQ ID NO: 7890 - DNA, 20 bp, synthetic construct
  misc_feature 1..20: note = Description of Artificial Sequence: Synthetic oligonucleotide
  misc_feature 1..20: note = Target: ANGPTL4; (-) strand; PAM type: NRG; PAM sequence: CGG
  source 1..20: mol_type = other DNA
tagcctggcggggttggggg

SEQ ID NO: 7891 - DNA, 20 bp, synthetic construct
  misc_feature 1..20: note = Description of Artificial Sequence: Synthetic oligonucleotide
  misc_feature 1..20: note = Target: ANGPTL4; (-) strand; PAM type: NRG; PAM sequence: GGG
  source 1..20: mol_type = other DNA
tgctagcctggcggggttgg

SEQ ID NO: 7892 - DNA, 20 bp, synthetic construct
  misc_feature 1..20: note = Description of Artificial Sequence: Synthetic oligonucleotide
  misc_feature 1..20: note = Target: ANGPTL4; (-) strand; PAM type: NRG; PAM sequence: GGG
  source 1..20: mol_type = other DNA
atgctagcctggcggggttg

SEQ ID NO: 7893 - DNA, 20 bp, synthetic construct
  misc_feature 1..20: note = Description of Artificial Sequence: Synthetic oligonucleotide
  misc_feature 1..20: note = Target: ANGPTL4; (-) strand; PAM type: NRG; PAM sequence: GGG
  source 1..20: mol_type = other DNA
gatgctagcctggcggggtt

SEQ ID NO: 7894 - DNA, 20 bp, synthetic construct
  misc_feature 1..20: note = Description of Artificial Sequence: Synthetic oligonucleotide
  misc_feature 1..20: note = Target: ANGPTL4; (-) strand; PAM type: NRG; PAM sequence: TGG
  source 1..20: mol_type = other DNA
agatgctagcctggcggggt

SEQ ID NO: 7895 - DNA, 20 bp, synthetic construct
  misc_feature 1..20: note = Description of Artificial Sequence: Synthetic oligonucleotide
  misc_feature 1..20: note = Target: ANGPTL4; (-) strand; PAM type: NRG; PAM sequence: GGG
  source 1..20: mol_type = other DNA
gctgagatgctagcctggcg

SEQ ID NO: 7896 - DNA, 20 bp, synthetic construct
  misc_feature 1..20: note = Description of Artificial Sequence: Synthetic oligonucleotide
  misc_feature 1..20: note = Target: ANGPTL4; (-) strand; PAM type: NRG; PAM sequence: GGG
  source 1..20: mol_type = other DNA
cgctgagatgctagcctggc

SEQ ID NO: 7897 - DNA, 20 bp, synthetic construct
  misc_feature 1..20: note = Description of Artificial Sequence: Synthetic oligonucleotide
  misc_feature 1..20: note = Target: ANGPTL4; (-) strand; PAM type: NRG; PAM sequence: CGG
  source 1..20: mol_type = other DNA
acgctgagatgctagcctgg

SEQ ID NO: 7898 - DNA, 20 bp, synthetic construct
  misc_feature 1..20: note = Description of Artificial Sequence: Synthetic oligonucleotide
  misc_feature 1..20: note = Target: ANGPTL4; (-) strand; PAM type: NRG; PAM sequence: TGG
  source 1..20: mol_type = other DNA
accacgctgagatgctagcc

SEQ ID NO: 7899 - DNA, 20 bp, synthetic construct
  misc_feature 1..20: note = Description of Artificial Sequence: Synthetic oligonucleotide
  misc_feature 1..20: note = Target: ANGPTL4; (-) strand; PAM type: NRG; PAM sequence: TAG
  source 1..20: mol_type = other DNA
ccctgaccacgctgagatgc

SEQ ID NO: 7900 - DNA, 20 bp, synthetic construct
  misc_feature 1..20: note = Description of Artificial Sequence: Synthetic oligonucleotide
  misc_feature 1..20: note = Target: ANGPTL4; (-) strand; PAM type: NRG; PAM sequence: GAG
  source 1..20: mol_type = other DNA
gacaggaccctgaccacgct

SEQ ID NO: 7901 - DNA, 20 bp, synthetic construct
  misc_feature 1..20: note = Description of Artificial Sequence: Synthetic oligonucleotide
  misc_feature 1..20: note = Target: ANGPTL4; (-) strand; PAM type: NRG; PAM sequence: AGG
  source 1..20: mol_type = other DNA
gtggctttgggagggtggac

SEQ ID NO: 7902 - DNA, 20 bp, synthetic construct
  misc_feature 1..20: note = Description of Artificial Sequence: Synthetic oligonucleotide
  misc_feature 1..20: note = Target: ANGPTL4; (-) strand; PAM type: NRG; PAM sequence: CAG
  source 1..20: mol_type = other DNA
ggtggctttgggagggtgga

SEQ ID NO: 7903 - DNA, 20 bp, synthetic construct
  misc_feature 1..20: note = Description of Artificial Sequence: Synthetic oligonucleotide
  misc_feature 1..20: note = Target: ANGPTL4; (-) strand; PAM type: NRG; PAM sequence: TGG
  source 1..20: mol_type = other DNA
ggatggtggctttgggaggg

SEQ ID NO: 7904 - DNA, 20 bp, synthetic construct
  misc_feature 1..20: note = Description of Artificial Sequence: Synthetic oligonucleotide
  misc_feature 1..20: note = Target: ANGPTL4; (-) strand; PAM type: NRG; PAM sequence: GGG
  source 1..20: mol_type = other DNA
ctgggatggtggctttggga

SEQ ID NO: 7905 - DNA, 20 bp, synthetic construct
  misc_feature 1..20: note = Description of Artificial Sequence: Synthetic oligonucleotide
  misc_feature 1..20: note = Target: ANGPTL4; (-) strand; PAM type: NRG; PAM sequence: AGG
  source 1..20: mol_type = other DNA
cctgggatggtggctttggg

SEQ ID NO: 7906 - DNA, 20 bp, synthetic construct
  misc_feature 1..20: note = Description of Artificial Sequence: Synthetic oligonucleotide
  misc_feature 1..20: note = Target: ANGPTL4; (-) strand; PAM type: NRG; PAM sequence: GAG
  source 1..20: mol_type = other DNA
tcctgggatggtggctttgg

SEQ ID NO: 7907 - DNA, 20 bp, synthetic construct
  misc_feature 1..20: note = Description of Artificial Sequence: Synthetic oligonucleotide
  misc_feature 1..20: note = Target: ANGPTL4; (-) strand; PAM type: NRG; PAM sequence: GGG
  source 1..20: mol_type = other DNA
catcctgggatggtggcttt

SEQ ID NO: 7908 - DNA, 20 bp, synthetic construct
  misc_feature 1..20: note = Description of Artificial Sequence: Synthetic oligonucleotide
  misc_feature 1..20: note = Target: ANGPTL4; (-) strand; PAM type: NRG; PAM sequence: TGG
  source 1..20: mol_type = other DNA
tcatcctgggatggtggctt

SEQ ID NO: 7909 - DNA, 20 bp, synthetic construct
  misc_feature 1..20: note = Description of Artificial Sequence: Synthetic oligonucleotide
  misc_feature 1..20: note = Target: ANGPTL4; (-) strand; PAM type: NRG; PAM sequence: TGG
  source 1..20: mol_type = other DNA
agcccctcatcctgggatgg

SEQ ID NO: 7910 - DNA, 20 bp, synthetic construct
  misc_feature 1..20: note = Description of Artificial Sequence: Synthetic oligonucleotide
  misc_feature 1..20: note = Target: ANGPTL4; (-) strand; PAM type: NRG; PAM sequence: TGG
  source 1..20: mol_type = other DNA
agaagcccctcatcctggga

SEQ ID NO: 7911 - DNA, 20 bp, synthetic construct
  misc_feature 1..20: note = Description of Artificial Sequence: Synthetic oligonucleotide
  misc_feature 1..20: note = Target: ANGPTL4; (-) strand; PAM type: NRG; PAM sequence: GGG
  source 1..20: mol_type = other DNA
ctccagaagcccctcatcct

SEQ ID NO: 7912 - DNA, 20 bp, synthetic construct
  misc_feature 1..20: note = Description of Artificial Sequence: Synthetic oligonucleotide
  misc_feature 1..20: note = Target: ANGPTL4; (-) strand; PAM type: NRG; PAM sequence: TGG
  source 1..20: mol_type = other DNA
cctccagaagcccctcatcc

SEQ ID NO: 7913 - DNA, 20 bp, synthetic construct
  misc_feature 1..20: note = Description of Artificial Sequence: Synthetic oligonucleotide
  misc_feature 1..20: note = Target: ANGPTL4; (-) strand; PAM type: NRG; PAM sequence: AAG
  source 1..20: mol_type = other DNA
cttcccccgtcaccctccag

SEQ ID NO: 7914 - DNA, 20 bp, synthetic construct
  misc_feature 1..20: note = Description of Artificial Sequence: Synthetic oligonucleotide
  misc_feature 1..20: note = Target: ANGPTL4; (-) strand; PAM type: NRG; PAM sequence: CAG
  source 1..20: mol_type = other DNA
tgccttcccccgtcaccctc

SEQ ID NO: 7915 - DNA, 20 bp, synthetic construct
  misc_feature 1..20: note = Description of Artificial Sequence: Synthetic oligonucleotide
  misc_feature 1..20: note = Target: ANGPTL4; (-) strand; PAM type: NRG; PAM sequence: AGG
  source 1..20: mol_type = other DNA
ttccaccgcatttcccagcc

SEQ ID NO: 7916 - DNA, 20 bp, synthetic construct
  misc_feature 1..20: note = Description of Artificial Sequence: Synthetic oligonucleotide
  misc_feature 1..20: note = Target: ANGPTL4; (-) strand; PAM type: NRG; PAM sequence: CAG
  source 1..20: mol_type = other DNA
cttccaccgcatttcccagc

SEQ ID NO: 7917 - DNA, 20 bp, synthetic construct
  misc_feature 1..20: note = Description of Artificial Sequence: Synthetic oligonucleotide
  misc_feature 1..20: note = Target: ANGPTL4; (-) strand; PAM type: NRG; PAM sequence: CAG
  source 1..20: mol_type = other DNA
cccccttccaccgcatttcc

SEQ ID NO: 7918 - DNA, 20 bp, synthetic construct
  misc_feature 1..20: note = Description of Artificial Sequence: Synthetic oligonucleotide
  misc_feature 1..20: note = Target: ANGPTL4; (-) strand; PAM type: NRG; PAM sequence: CAG
  source 1..20: mol_type = other DNA
gtctgggagtcccgaaccca

SEQ ID NO: 7919 - DNA, 20 bp, synthetic construct
  misc_feature 1..20: note = Description of Artificial Sequence: Synthetic oligonucleotide
  misc_feature 1..20: note = Target: ANGPTL4; (-) strand; PAM type: NRG; PAM sequence: GAG
  source 1..20: mol_type = other DNA
ggcctgagccaagagtctgg

SEQ ID NO: 7920 - DNA, 20 bp, synthetic construct
  misc_feature 1..20: note = Description of Artificial Sequence: Synthetic oligonucleotide
  misc_feature 1..20: note = Target: ANGPTL4; (-) strand; PAM type: NRG; PAM sequence: GGG
  source 1..20: mol_type = other DNA
cgggcctgagccaagagtct

SEQ ID NO: 7921 - DNA, 20 bp, synthetic construct
  misc_feature 1..20: note = Description of Artificial Sequence: Synthetic oligonucleotide
  misc_feature 1..20: note = Target: ANGPTL4; (-) strand; PAM type: NRG; PAM sequence: TGG
  source 1..20: mol_type = other DNA
gcgggcctgagccaagagtc

SEQ ID NO: 7922 - DNA, 20 bp, synthetic construct
  misc_feature 1..20: note = Description of Artificial Sequence: Synthetic oligonucleotide
  misc_feature 1..20: note = Target: ANGPTL4; (-) strand; PAM type: NRG; PAM sequence: GAG
  source 1..20: mol_type = other DNA
acttggcgggcctgagccaa

SEQ ID NO: 7923 - DNA, 20 bp, synthetic construct
  misc_feature 1..20: note = Description of Artificial Sequence: Synthetic oligonucleotide
  misc_feature 1..20: note = Target: ANGPTL4; (-) strand; PAM type: NRG; PAM sequence: AAG
  source 1..20: mol_type = other DNA
ctacttggcgggcctgagcc

SEQ ID NO: 7924 - DNA, 20 bp, synthetic construct
  misc_feature 1..20: note = Description of Artificial Sequence: Synthetic oligonucleotide
  misc_feature 1..20: note = Target: ANGPTL4; (-) strand; PAM type: NRG; PAM sequence: GAG
  source 1..20: mol_type = other DNA
ttctcctacttggcgggcct

SEQ ID NO: 7925 - DNA, 20 bp, synthetic construct
  misc_feature 1..20: note = Description of Artificial Sequence: Synthetic oligonucleotide
  misc_feature 1..20: note = Target: ANGPTL4; (-) strand; PAM type: NRG; PAM sequence: GGG
  source 1..20: mol_type = other DNA
tgaactttctcctacttggc

SEQ ID NO: 7926 - DNA, 20 bp, synthetic construct
  misc_feature 1..20: note = Description of Artificial Sequence: Synthetic oligonucleotide
  misc_feature 1..20: note = Target: ANGPTL4; (-) strand; PAM type: NRG; PAM sequence: CGG
  source 1..20: mol_type = other DNA
ctgaactttctcctacttgg

SEQ ID NO: 7927 - DNA, 20 bp, synthetic construct
  misc_feature 1..20: note = Description of Artificial Sequence: Synthetic oligonucleotide
  misc_feature 1..20: note = Target: ANGPTL4; (-) strand; PAM type: NRG; PAM sequence: TGG
  source 1..20: mol_type = other DNA
gctctgaactttctcctact

SEQ ID NO: 7928 - DNA, 20 bp, synthetic construct
  misc_feature 1..20: note = Description of Artificial Sequence: Synthetic oligonucleotide
  misc_feature 1..20: note = Target: ANGPTL4; (-) strand; PAM type: NRG; PAM sequence: CAG
  source 1..20: mol_type = other DNA
atgccagctgttcgccttcc

SEQ ID NO: 7929 - DNA, 20 bp, synthetic construct
  misc_feature 1..20: note = Description of Artificial Sequence: Synthetic oligonucleotide
  misc_feature 1..20: note = Target: ANGPTL4; (-) strand; PAM type: NRG; PAM sequence: CAG
  source 1..20: mol_type = other DNA
agtgtggcttccatgaatgc

SEQ ID NO: 7930 - DNA, 20 bp, synthetic construct
  misc_feature 1..20: note = Description of Artificial Sequence: Synthetic oligonucleotide
  misc_feature 1..20: note = Target: ANGPTL4; (-) strand; PAM type: NRG; PAM sequence: TGG
  source 1..20: mol_type = other DNA
acgcggccaaaccaccagtg

SEQ ID NO: 7931 - DNA, 20 bp, synthetic construct
  misc_feature 1..20: note = Description of Artificial Sequence: Synthetic oligonucleotide
  misc_feature 1..20: note = Target: ANGPTL4; (-) strand; PAM type: NRG; PAM sequence: CAG
  source 1..20: mol_type = other DNA
tgggcacgcggccaaaccac

SEQ ID NO: 7932 - DNA, 20 bp, synthetic construct
  misc_feature 1..20: note = Description of Artificial Sequence: Synthetic oligonucleotide
  misc_feature 1..20: note = Target: ANGPTL4; (-) strand; PAM type: NRG; PAM sequence: CGG
  source 1..20: mol_type = other DNA
atccagtaaggatgggcacg

SEQ ID NO: 7933 - DNA, 20 bp, synthetic construct
  misc_feature 1..20: note = Description of Artificial Sequence: Synthetic oligonucleotide
  misc_feature 1..20: note = Target: ANGPTL4; (-) strand; PAM type: NRG; PAM sequence: GGG
  source 1..20: mol_type = other DNA
tcctcccatccagtaaggat

SEQ ID NO: 7934 - DNA, 20 bp, synthetic construct
  misc_feature 1..20: note = Description of Artificial Sequence: Synthetic oligonucleotide
  misc_feature 1..20: note = Target: ANGPTL4; (-) strand; PAM type: NRG; PAM sequence: TGG
  source 1..20: mol_type = other DNA
ttcctcccatccagtaagga

SEQ ID NO: 7935 - DNA, 20 bp, synthetic construct
  misc_feature 1..20: note = Description of Artificial Sequence: Synthetic oligonucleotide
  misc_feature 1..20: note = Target: ANGPTL4; (-) strand; PAM type: NRG; PAM sequence: AGG
  source 1..20: mol_type = other DNA
tactttcctcccatccagta

SEQ ID NO: 7936 - DNA, 20 bp, synthetic construct
  misc_feature 1..20: note = Description of Artificial Sequence: Synthetic oligonucleotide
  misc_feature 1..20: note = Target: ANGPTL4; (-) strand; PAM type: NRG; PAM sequence: AAG
  source 1..20: mol_type = other DNA
ctactttcctcccatccagt

SEQ ID NO: 7937 - DNA, 20 bp, synthetic construct
  misc_feature 1..20: note = Description of Artificial Sequence: Synthetic oligonucleotide
  misc_feature 1..20: note = Target: ANGPTL4; (-) strand; PAM type: NRG; PAM sequence: CAG
  source 1..20: mol_type = other DNA
tcccctactttcctcccatc

SEQ ID NO: 7938 - DNA, 20 bp, synthetic construct
  misc_feature 1..20: note = Description of Artificial Sequence: Synthetic oligonucleotide
  misc_feature 1..20: note = Target: ANGPTL4; (-) strand; PAM type: NRG; PAM sequence: AGG
  source 1..20: mol_type = other DNA
aagacgctttccggcccctc

SEQ ID NO: 7939 - DNA, 20 bp, synthetic construct
  misc_feature 1..20: note = Description of Artificial Sequence: Synthetic oligonucleotide
  misc_feature 1..20: note = Target: ANGPTL4; (-) strand; PAM type: NRG; PAM sequence: CAG
  source 1..20: mol_type = other DNA
gaagacgctttccggcccct

SEQ ID NO: 7940 - DNA, 20 bp, synthetic construct
  misc_feature 1..20: note = Description of Artificial Sequence: Synthetic oligonucleotide
  misc_feature 1..20: note = Target: ANGPTL4; (-) strand; PAM type: NRG; PAM sequence: CGG
  source 1..20: mol_type = other DNA
gtgaccaggaagacgctttc

SEQ ID NO: 7941 - DNA, 20 bp, synthetic construct
  misc_feature 1..20: note = Description of Artificial Sequence: Synthetic oligonucleotide
  misc_feature 1..20: note = Target: ANGPTL4; (-) strand; PAM type: NRG; PAM sequence: AAG
  source 1..20: mol_type = other DNA
gcgggcccagagtgaccagg

SEQ ID NO: 7942 - DNA, 20 bp, synthetic construct
  misc_feature 1..20: note = Description of Artificial Sequence: Synthetic oligonucleotide
  misc_feature 1..20: note = Target: ANGPTL4; (-) strand; PAM type: NRG; PAM sequence: AGG
  source 1..20: mol_type = other DNA
ggggcgggcccagagtgacc

SEQ ID NO: 7943 - DNA, 20 bp, synthetic construct
  misc_feature 1..20: note = Description of Artificial Sequence: Synthetic oligonucleotide
  misc_feature 1..20: note = Target: ANGPTL4; (-) strand; PAM type: NRG; PAM sequence: CAG
  source 1..20: mol_type = other DNA
gggggcgggcccagagtgac

SEQ ID NO: 7944 - DNA, 20 bp, synthetic construct
  misc_feature 1..20: note = Description of Artificial Sequence: Synthetic oligonucleotide
  misc_feature 1..20: note = Target: ANGPTL4; (-) strand; PAM type: NRG; PAM sequence: GAG
  source 1..20: mol_type = other DNA
tgggggtgggggcgggccca

SEQ ID NO: 7945 - DNA, 20 bp, synthetic construct
  misc_feature 1..20: note = Description of Artificial Sequence: Synthetic oligonucleotide
  misc_feature 1..20: note = Target: ANGPTL4; (-) strand; PAM type: NRG; PAM sequence: CAG
  source 1..20: mol_type = other DNA
ggtgggggtgggggcgggcc

SEQ ID NO: 7946 - DNA, 20 bp, synthetic construct
  misc_feature 1..20: note = Description of Artificial Sequence: Synthetic oligonucleotide
  misc_feature 1..20: note = Target: ANGPTL4; (-) strand; PAM type: NRG; PAM sequence: GGG
  source 1..20: mol_type = other DNA
tgcacggtgggggtgggggc

SEQ ID NO: 7947 - DNA, 20 bp, synthetic construct
  misc_feature 1..20: note = Description of Artificial Sequence: Synthetic oligonucleotide
  misc_feature 1..20: note = Target: ANGPTL4; (-) strand; PAM type: NRG; PAM sequence: CGG
  source 1..20: mol_type = other DNA
ctgcacggtgggggtggggg

SEQ ID NO: 7948 - DNA, 20 bp, synthetic construct
  misc_feature 1..20: note = Description of Artificial Sequence: Synthetic oligonucleotide
  misc_feature 1..20: note = Target: ANGPTL4; (-) strand; PAM type: NRG; PAM sequence: GGG
  source 1..20: mol_type = other DNA
agtctgcacggtgggggtgg

SEQ ID NO: 7949 - DNA, 20 bp, synthetic construct
  misc_feature 1..20: note = Description of Artificial Sequence: Synthetic oligonucleotide
  misc_feature 1..20: note = Target: ANGPTL4; (-) strand; PAM type: NRG; PAM sequence: GGG
  source 1..20: mol_type = other DNA
gagtctgcacggtgggggtg

SEQ ID NO: 7950 - DNA, 20 bp, synthetic construct
  misc_feature 1..20: note = Description of Artificial Sequence: Synthetic oligonucleotide
  misc_feature 1..20: note = Target: ANGPTL4; (-) strand; PAM type: NRG; PAM sequence: GGG
  source 1..20: mol_type = other DNA
tgagtctgcacggtgggggt

SEQ ID NO: 7951 - DNA, 20 bp, synthetic construct
  misc_feature 1..20: note = Description of Artificial Sequence: Synthetic oligonucleotide
  misc_feature 1..20: note = Target: ANGPTL4; (-) strand; PAM type: NRG; PAM sequence: TGG
  source 1..20: mol_type = other DNA
atgagtctgcacggtggggg

SEQ ID NO: 7952 - DNA, 20 bp, synthetic construct
  misc_feature 1..20: note = Description of Artificial Sequence: Synthetic oligonucleotide
  misc_feature 1..20: note = Target: ANGPTL4; (-) strand; PAM type: NRG; PAM sequence: GGG
  source 1..20: mol_type = other DNA
gaaatgagtctgcacggtgg

SEQ ID NO: 7953 - DNA, 20 bp, synthetic construct
  misc_feature 1..20: note = Description of Artificial Sequence: Synthetic oligonucleotide
  misc_feature 1..20: note = Target: ANGPTL4; (-) strand; PAM type: NRG; PAM sequence: GGG
  source 1..20: mol_type = other DNA
cgaaatgagtctgcacggtg

SEQ ID NO: 7954 - DNA, 20 bp, synthetic construct
  misc_feature 1..20: note = Description of Artificial Sequence: Synthetic oligonucleotide
  misc_feature 1..20: note = Target: ANGPTL4; (-) strand; PAM type: NRG; PAM sequence: GGG
  source 1..20: mol_type = other DNA
tcgaaatgagtctgcacggt

SEQ ID NO: 7955 - DNA, 20 bp, synthetic construct
  misc_feature 1..20: note = Description of Artificial Sequence: Synthetic oligonucleotide
  misc_feature 1..20: note = Target: ANGPTL4; (-) strand; PAM type: NRG; PAM sequence: TGG
  source 1..20: mol_type = other DNA
gtcgaaatgagtctgcacgg

SEQ ID NO: 7956 - DNA, 20 bp, synthetic construct
  misc_feature 1..20: note = Description of Artificial Sequence: Synthetic oligonucleotide
  misc_feature 1..20: note = Target: ANGPTL4; (-) strand; PAM type: NRG; PAM sequence: CGG
  source 1..20: mol_type = other DNA
aaggtcgaaatgagtctgca

SEQ ID NO: 7957 - DNA, 20 bp, synthetic construct
  misc_feature 1..20: note = Description of Artificial Sequence: Synthetic oligonucleotide
  misc_feature 1..20: note = Target: ANGPTL4; (-) strand; PAM type: NRG; PAM sequence: GAG
  source 1..20: mol_type = other DNA
agtaggggaaaggtcgaaat

SEQ ID NO: 7958 - DNA, 20 bp, synthetic construct
  misc_feature 1..20: note = Description of Artificial Sequence: Synthetic oligonucleotide
  misc_feature 1..20: note = Target: ANGPTL4; (-) strand; PAM type: NRG; PAM sequence: AGG
  source 1..20: mol_type = other DNA
cagccggaaaagtaggggaa

SEQ ID NO: 7959 - DNA, 20 bp, synthetic construct
  misc_feature 1..20: note = Description of Artificial Sequence: Synthetic oligonucleotide
  misc_feature 1..20: note = Target: ANGPTL4; (-) strand; PAM type: NRG; PAM sequence: AAG
  source 1..20: mol_type = other DNA
ccagccggaaaagtagggga

SEQ ID NO: 7960 - DNA, 20 bp, synthetic construct
  misc_feature 1..20: note = Description of Artificial Sequence: Synthetic oligonucleotide
  misc_feature 1..20: note = Target: ANGPTL4; (-) strand; PAM type: NRG; PAM sequence: GGG
  source 1..20: mol_type = other DNA
cagcccagccggaaaagtag

SEQ ID NO: 7961 - DNA, 20 bp, synthetic construct
  misc_feature 1..20: note = Description of Artificial Sequence: Synthetic oligonucleotide
  misc_feature 1..20: note = Target: ANGPTL4; (-) strand; PAM type: NRG; PAM sequence: GGG
  source 1..20: mol_type = other DNA
ccagcccagccggaaaagta

SEQ ID NO: 7962 - DNA, 20 bp, synthetic construct
  misc_feature 1..20: note = Description of Artificial Sequence: Synthetic oligonucleotide
  misc_feature 1..20: note = Target: ANGPTL4; (-) strand; PAM type: NRG; PAM sequence: AGG
  source 1..20: mol_type = other DNA
cccagcccagccggaaaagt

SEQ ID NO: 7963 - DNA, 20 bp, synthetic construct
  misc_feature 1..20: note = Description of Artificial Sequence: Synthetic oligonucleotide
  misc_feature 1..20: note = Target: ANGPTL4; (-) strand; PAM type: NRG; PAM sequence: TAG
  source 1..20: mol_type = other DNA
ccccagcccagccggaaaag

SEQ ID NO: 7964 - DNA, 20 bp, synthetic construct
  misc_feature 1..20: note = Description of Artificial Sequence: Synthetic oligonucleotide
  misc_feature 1..20: note = Target: ANGPTL4; (-) strand; PAM type: NRG; PAM sequence: AAG
  source 1..20: mol_type = other DNA
cgcccccagcccagccggaa

SEQ ID NO: 7965 - DNA, 20 bp, synthetic construct
  misc_feature 1..20: note = Description of Artificial Sequence: Synthetic oligonucleotide
  misc_feature 1..20: note = Target: ANGPTL4; (-) strand; PAM type: NRG; PAM sequence: CGG
  source 1..20: mol_type = other DNA
ggaaccgcccccagcccagc

SEQ ID NO: 7966 - DNA, 20 bp, synthetic construct
  misc_feature 1..20: note = Description of Artificial Sequence: Synthetic oligonucleotide
  misc_feature 1..20: note = Target: ANGPTL4; (-) strand; PAM type: NRG; PAM sequence: CAG
  source 1..20: mol_type = other DNA
gggaggaaccgcccccagcc

SEQ ID NO: 7967 - DNA, 20 bp, synthetic construct
  misc_feature 1..20: note = Description of Artificial Sequence: Synthetic oligonucleotide
  misc_feature 1..20: note = Target: ANGPTL4; (-) strand; PAM type: NRG; PAM sequence: CAG
  source 1..20: mol_type = other DNA
agactgggaggaaccgcccc

SEQ ID NO: 7968 - DNA, 20 bp, synthetic construct
  misc_feature 1..20: note = Description of Artificial Sequence: Synthetic oligonucleotide
  misc_feature 1..20: note = Target: ANGPTL4; (-) strand; PAM type: NRG; PAM sequence: AGG
  source 1..20: mol_type = other DNA
ctcagacgctccagactggg

SEQ ID NO: 7969 - DNA, 20 bp, synthetic construct
  misc_feature 1..20: note = Description of Artificial Sequence: Synthetic oligonucleotide
  misc_feature 1..20: note = Target: ANGPTL4; (-) strand; PAM type: NRG; PAM sequence: GAG
  source 1..20: mol_type = other DNA
gctcagacgctccagactgg

SEQ ID NO: 7970 - DNA, 20 bp, synthetic construct
  misc_feature 1..20: note = Description of Artificial Sequence: Synthetic oligonucleotide
  misc_feature 1..20: note = Target: ANGPTL4; (-) strand; PAM type: NRG; PAM sequence: GGG
  source 1..20: mol_type = other DNA
aggctcagacgctccagact

SEQ ID NO: 7971 - DNA, 20 bp, synthetic construct
  misc_feature 1..20: note = Description of Artificial Sequence: Synthetic oligonucleotide
  misc_feature 1..20: note = Target: ANGPTL4; (-) strand; PAM type: NRG; PAM sequence: TGG
  source 1..20: mol_type = other DNA
gaggctcagacgctccagac

SEQ ID NO: 7972 - DNA, 20 bp, synthetic construct
  misc_feature 1..20: note = Description of Artificial Sequence: Synthetic oligonucleotide
  misc_feature 1..20: note = Target: ANGPTL4; (-) strand; PAM type: NRG; PAM sequence: CAG
  source 1..20: mol_type = other DNA
gtctggaggctcagacgctc

SEQ ID NO: 7973 - DNA, 20 bp, synthetic construct
  misc_feature 1..20: note = Description of Artificial Sequence: Synthetic oligonucleotide
  misc_feature 1..20: note = Target: ANGPTL4; (-) strand; PAM type: NRG; PAM sequence: CAG
  source 1..20: mol_type = other DNA
gttgagcacgtctggaggct

SEQ ID NO: 7974 - DNA, 20 bp, synthetic construct
  misc_feature 1..20: note = Description of Artificial Sequence: Synthetic oligonucleotide
  misc_feature 1..20: note = Target: ANGPTL4; (-) strand; PAM type: NRG; PAM sequence: AGG
  source 1..20: mol_type = other DNA
atggcgttgagcacgtctgg

SEQ ID NO: 7975 - DNA, 20 bp, synthetic construct
  misc_feature 1..20: note = Description of Artificial Sequence: Synthetic oligonucleotide
  misc_feature 1..20: note = Target: ANGPTL4; (-) strand; PAM type: NRG; PAM sequence: GAG
  source 1..20: mol_type = other DNA
gatggcgttgagcacgtctg

SEQ ID NO: 7976 - DNA, 20 bp, synthetic construct
  misc_feature 1..20: note = Description of Artificial Sequence: Synthetic oligonucleotide
  misc_feature 1..20: note = Target: ANGPTL4; (-) strand; PAM type: NRG; PAM sequence: TGG
  source 1..20: mol_type = other DNA
aggatggcgttgagcacgtc

SEQ ID NO: 7977 - DNA, 20 bp, synthetic construct
  misc_feature 1..20: note = Description of Artificial Sequence: Synthetic oligonucleotide
  misc_feature 1..20: note = Target: ANGPTL4; (-) strand; PAM type: NRG; PAM sequence: GAG
  source 1..20: mol_type = other DNA
gaggaggggaggatggcgtt

SEQ ID NO: 7978 - DNA, 20 bp, synthetic construct
  misc_feature 1..20: note = Description of Artificial Sequence: Synthetic oligonucleotide
  misc_feature 1..20: note = Target: ANGPTL4; (-) strand; PAM type: NRG; PAM sequence: TGG
  source 1..20: mol_type = other DNA
agggagggaggaggggagga

SEQ ID NO: 7979 - DNA, 20 bp, synthetic construct
  misc_feature 1..20: note = Description of Artificial Sequence: Synthetic oligonucleotide
  misc_feature 1..20: note = Target: ANGPTL4; (-) strand; PAM type: NRG; PAM sequence: AGG
  source 1..20: mol_type = other DNA
aaagagggagggaggagggg

SEQ ID NO: 7980 - DNA, 20 bp, synthetic construct
  misc_feature 1..20: note = Description of Artificial Sequence: Synthetic oligonucleotide
  misc_feature 1..20: note = Target: ANGPTL4; (-) strand; PAM type: NRG; PAM sequence: GAG
  source 1..20: mol_type = other DNA
gaaagagggagggaggaggg

SEQ ID NO: 7981 - DNA, 20 bp, synthetic construct
  misc_feature 1..20: note = Description of Artificial Sequence: Synthetic oligonucleotide
  misc_feature 1..20: note = Target: ANGPTL4; (-) strand; PAM type: NRG; PAM sequence: GGG
  source 1..20: mol_type = other DNA
aagaaagagggagggaggag

SEQ ID NO: 7982 - DNA, 20 bp, synthetic construct
  misc_feature 1..20: note = Description of Artificial Sequence: Synthetic oligonucleotide
  misc_feature 1..20: note = Target: ANGPTL4; (-) strand; PAM type: NRG; PAM sequence: GGG
  source 1..20: mol_type = other DNA
aaagaaagagggagggagga

SEQ ID NO: 7983 - DNA, 20 bp, synthetic construct
  misc_feature 1..20: note = Description of Artificial Sequence: Synthetic oligonucleotide
  misc_feature 1..20: note = Target: ANGPTL4; (-) strand; PAM type: NRG; PAM sequence: AGG
  source 1..20: mol_type = other DNA
gaaagaaagagggagggagg

SEQ ID NO: 7984 - DNA, 20 bp, synthetic construct
  misc_feature 1..20: note = Description of Artificial Sequence: Synthetic oligonucleotide
  misc_feature 1..20: note = Target: ANGPTL4; (-) strand; PAM type: NRG; PAM sequence: GAG
  source 1..20: mol_type = other DNA
ggaaagaaagagggagggag

SEQ ID NO: 7985 - DNA, 20 bp, synthetic construct
  misc_feature 1..20: note = Description of Artificial Sequence: Synthetic oligonucleotide
  misc_feature 1..20: note = Target: ANGPTL4; (-) strand; PAM type: NRG; PAM sequence: AGG
  source 1..20: mol_type = other DNA
gaggaaagaaagagggaggg

SEQ ID NO: 7986 - DNA, 20 bp, synthetic construct
  misc_feature 1..20: note = Description of Artificial Sequence: Synthetic oligonucleotide
  misc_feature 1..20: note = Target: ANGPTL4; (-) strand; PAM type: NRG; PAM sequence: GAG
  source 1..20: mol_type = other DNA
tgaggaaagaaagagggagg

SEQ ID NO: 7987 - DNA, 20 bp, synthetic construct
  misc_feature 1..20: note = Description of Artificial Sequence: Synthetic oligonucleotide
  misc_feature 1..20: note = Target: ANGPTL4; (-) strand; PAM type: NRG; PAM sequence: GGG
  source 1..20: mol_type = other DNA
gttgaggaaagaaagaggga

SEQ ID NO: 7988 - DNA, 20 bp, synthetic construct
  misc_feature 1..20: note = Description of Artificial Sequence: Synthetic oligonucleotide
  misc_feature 1..20: note = Target: ANGPTL4; (-) strand; PAM type: NRG; PAM sequence: AGG
  source 1..20: mol_type = other DNA
ggttgaggaaagaaagaggg

SEQ ID NO: 7989 - DNA, 20 bp, synthetic construct
  misc_feature 1..20: note = Description of Artificial Sequence: Synthetic oligonucleotide
  misc_feature 1..20: note = Target: ANGPTL4; (-) strand; PAM type: NRG; PAM sequence: GAG
  source 1..20: mol_type = other DNA
gggttgaggaaagaaagagg

SEQ ID NO: 7990 - DNA, 20 bp, synthetic construct
  misc_feature 1..20: note = Description of Artificial Sequence: Synthetic oligonucleotide
  misc_feature 1..20: note = Target: ANGPTL4; (-) strand; PAM type: NRG; PAM sequence: GGG
  source 1..20: mol_type = other DNA
cagggttgaggaaagaaaga

SEQ ID NO: 7991 - DNA, 20 bp, synthetic construct
  misc_feature 1..20: note = Description of Artificial Sequence: Synthetic oligonucleotide
  misc_feature 1..20: note = Target: ANGPTL4; (-) strand; PAM type: NRG; PAM sequence: AGG
  source 1..20: mol_type = other DNA
gcagggttgaggaaagaaag

SEQ ID NO: 7992 - DNA, 20 bp, synthetic construct
  misc_feature 1..20: note = Description of Artificial Sequence: Synthetic oligonucleotide
  misc_feature 1..20: note = Target: ANGPTL4; (-) strand; PAM type: NRG; PAM sequence: GAG
  source 1..20: mol_type = other DNA
ggcagggttgaggaaagaaa

SEQ ID NO: 7993 - DNA, 20 bp, synthetic construct
  misc_feature 1..20: note = Description of Artificial Sequence: Synthetic oligonucleotide
  misc_feature 1..20: note = Target: ANGPTL4; (-) strand; PAM type: NRG; PAM sequence: AAG
  source 1..20: mol_type = other DNA
gaggcagggttgaggaaaga

SEQ ID NO: 7994 - DNA, 20 bp, synthetic construct
  misc_feature 1..20: note = Description of Artificial Sequence: Synthetic oligonucleotide
  misc_feature 1..20: note = Target: ANGPTL4; (-) strand; PAM type: NRG; PAM sequence: AAG
  source 1..20: mol_type = other DNA
agaggaggcagggttgagga

SEQ ID NO: 7995 - DNA, 20 bp, synthetic construct
  misc_feature 1..20: note = Description of Artificial Sequence: Synthetic oligonucleotide
  misc_feature 1..20: note = Target: ANGPTL4; (-) strand; PAM type: NRG; PAM sequence: AGG
  source 1..20: mol_type = other DNA
agggagaggaggcagggttg

SEQ ID NO: 7996 - DNA, 20 bp, synthetic construct
  misc_feature 1..20: note = Description of Artificial Sequence: Synthetic oligonucleotide
  misc_feature 1..20: note = Target: ANGPTL4; (-) strand; PAM type: NRG; PAM sequence: GAG
  source 1..20: mol_type = other DNA
gagggagaggaggcagggtt

SEQ ID NO: 7997 - DNA, 20 bp, synthetic construct
  misc_feature 1..20: note = Description of Artificial Sequence: Synthetic oligonucleotide
  misc_feature 1..20: note = Target: ANGPTL4; (-) strand; PAM type: NRG; PAM sequence: GGG
  source 1..20: mol_type = other DNA
tcctagagggagaggaggca

SEQ ID NO: 7998 - DNA, 20 bp, synthetic construct
  misc_feature 1..20: note = Description of Artificial Sequence: Synthetic oligonucleotide
  misc_feature 1..20: note = Target: ANGPTL4; (-) strand; PAM type: NRG; PAM sequence: AGG
  source 1..20: mol_type = other DNA
ctcctagagggagaggaggc

SEQ ID NO: 7999 - DNA, 20 bp, synthetic construct
  misc_feature 1..20: note = Description of Artificial Sequence: Synthetic oligonucleotide
  misc_feature 1..20: note = Target: ANGPTL4; (-) strand; PAM type: NRG; PAM sequence: CAG
  source 1..20: mol_type = other DNA
gctcctagagggagaggagg

SEQ ID NO: 8000 - DNA, 20 bp, synthetic construct
  misc_feature 1..20: note = Description of Artificial Sequence: Synthetic oligonucleotide
  misc_feature 1..20: note = Target: ANGPTL4; (-) strand; PAM type: NRG; PAM sequence: AGG
  source 1..20: mol_type = other DNA
ccagctcctagagggagagg

SEQ ID NO: 8001 - DNA, 20 bp, synthetic construct
  misc_feature 1..20: note = Description of Artificial Sequence: Synthetic oligonucleotide
  misc_feature 1..20: note = Target: ANGPTL4; (-) strand; PAM type: NRG; PAM sequence: GAG
  source 1..20: mol_type = other DNA
cccagctcctagagggagag

SEQ ID NO: 8002 - DNA, 20 bp, synthetic construct
  misc_feature 1..20: note = Description of Artificial Sequence: Synthetic oligonucleotide
  misc_feature 1..20: note = Target: ANGPTL4; (-) strand; PAM type: NRG; PAM sequence: AGG
  source 1..20: mol_type = other DNA
gtcccagctcctagagggag

SEQ ID NO: 8003 - DNA, 20 bp, synthetic construct
  misc_feature 1..20: note = Description of Artificial Sequence: Synthetic oligonucleotide
  misc_feature 1..20: note = Target: ANGPTL4; (-) strand; PAM type: NRG; PAM sequence: GAG
  source 1..20: mol_type = other DNA
ggtcccagctcctagaggga

SEQ ID NO: 8004 - DNA, 20 bp, synthetic construct
  misc_feature 1..20: note = Description of Artificial Sequence: Synthetic oligonucleotide
  misc_feature 1..20: note = Target: ANGPTL4; (-) strand; PAM type: NRG; PAM sequence: GAG
  source 1..20: mol_type = other DNA
ggggtcccagctcctagagg

SEQ ID NO: 8005 - DNA, 20 bp, synthetic construct
  misc_feature 1..20: note = Description of Artificial Sequence: Synthetic oligonucleotide
  misc_feature 1..20: note = Target: ANGPTL4; (-) strand; PAM type: NRG; PAM sequence: GGG
  source 1..20: mol_type = other DNA
ctggggtcccagctcctaga

SEQ ID NO: 8006 - DNA, 20 bp, synthetic construct
  misc_feature 1..20: note = Description of Artificial Sequence: Synthetic oligonucleotide
  misc_feature 1..20: note = Target: ANGPTL4; (-) strand; PAM type: NRG; PAM sequence: AGG
  source 1..20: mol_type = other DNA
cctggggtcccagctcctag

SEQ ID NO: 8007 - DNA, 20 bp, synthetic construct
  misc_feature 1..20: note = Description of Artificial Sequence: Synthetic oligonucleotide
  misc_feature 1..20: note = Target: ANGPTL4; (-) strand; PAM type: NRG; PAM sequence: GAG
  source 1..20: mol_type = other DNA
gcctggggtcccagctccta

SEQ ID NO: 8008 - DNA, 20 bp, synthetic construct
  misc_feature 1..20: note = Description of Artificial Sequence: Synthetic oligonucleotide
  misc_feature 1..20: note = Target: ANGPTL4; (-) strand; PAM type: NRG; PAM sequence: TAG
  source 1..20: mol_type = other DNA
ctgcctggggtcccagctcc

SEQ ID NO: 8009 - DNA, 20 bp, synthetic construct
  misc_feature 1..20: note = Description of Artificial Sequence: Synthetic oligonucleotide
  misc_feature 1..20: note = Target: ANGPTL4; (-) strand; PAM type: NRG; PAM sequence: CAG
  source 1..20: mol_type = other DNA
agaggctctgcctggggtcc

SEQ ID NO: 8010 - DNA, 20 bp, synthetic construct
  misc_feature 1..20: note = Description of Artificial Sequence: Synthetic oligonucleotide
  misc_feature 1..20: note = Target: ANGPTL4; (-) strand; PAM type: NRG; PAM sequence: GGG
  source 1..20: mol_type = other DNA
catctcagaggctctgcctg

SEQ ID NO: 8011 - DNA, 20 bp, synthetic construct
  misc_feature 1..20: note = Description of Artificial Sequence: Synthetic oligonucleotide
  misc_feature 1..20: note = Target: ANGPTL4; (-) strand; PAM type: NRG; PAM sequence: GGG
  source 1..20: mol_type = other DNA
gcatctcagaggctctgcct

SEQ ID NO: 8012 - DNA, 20 bp, synthetic construct
  misc_feature 1..20: note = Description of Artificial Sequence: Synthetic oligonucleotide
  misc_feature 1..20: note = Target: ANGPTL4; (-) strand; PAM type: NRG; PAM sequence: TGG
  source 1..20: mol_type = other DNA
agcatctcagaggctctgcc

SEQ ID NO: 8013 - DNA, 20 bp, synthetic construct
  misc_feature 1..20: note = Description of Artificial Sequence: Synthetic oligonucleotide
  misc_feature 1..20: note = Target: ANGPTL4; (-) strand; PAM type: NRG; PAM sequence: AGG
  source 1..20: mol_type = other DNA
gctgagcaggagcatctcag

SEQ ID NO: 8014 - DNA, 20 bp, synthetic construct
  misc_feature 1..20: note = Description of Artificial Sequence: Synthetic oligonucleotide
  misc_feature 1..20: note = Target: ANGPTL4; (-) strand; PAM type: NRG; PAM sequence: GAG
  source 1..20: mol_type = other DNA
tgctgagcaggagcatctca

SEQ ID NO: 8015 - DNA, 20 bp, synthetic construct
  misc_feature 1..20: note = Description of Artificial Sequence: Synthetic oligonucleotide
  misc_feature 1..20: note = Target: ANGPTL4; (-) strand; PAM type: NRG; PAM sequence: CAG
  source 1..20: mol_type = other DNA
tgtgctgagcaggagcatct

SEQ ID NO: 8016 - DNA, 20 bp, synthetic construct
  misc_feature 1..20: note = Description of Artificial Sequence: Synthetic oligonucleotide
  misc_feature 1..20: note = Target: ANGPTL4; (-) strand; PAM type: NRG; PAM sequence: GAG
  source 1..20: mol_type = other DNA
ggaagaactgtgctgagcag

SEQ ID NO: 8017 - DNA, 20 bp, synthetic construct
  misc_feature 1..20: note = Description of Artificial Sequence: Synthetic oligonucleotide
  misc_feature 1..20: note = Target: ANGPTL4; (-) strand; PAM type: NRG; PAM sequence: AGG
  source 1..20: mol_type = other DNA
cgggaagaactgtgctgagc

SEQ ID NO: 8018 - DNA, 20 bp, synthetic construct
  misc_feature 1..20: note = Description of Artificial Sequence: Synthetic oligonucleotide
  misc_feature 1..20: note = Target: ANGPTL4; (-) strand; PAM type: NRG; PAM sequence: CAG
  source 1..20: mol_type = other DNA
acgggaagaactgtgctgag

SEQ ID NO: 8019 - DNA, 20 bp, synthetic construct
  misc_feature 1..20: note = Description of Artificial Sequence: Synthetic oligonucleotide
  misc_feature 1..20: note = Target: ANGPTL4; (-) strand; PAM type: NRG; PAM sequence: GAG
  source 1..20: mol_type = other DNA
agaacgggaagaactgtgct

SEQ ID NO: 8020 - DNA, 20 bp, synthetic construct
  misc_feature 1..20: note = Description of Artificial Sequence: Synthetic oligonucleotide
  misc_feature 1..20: note = Target: ANGPTL4; (-) strand; PAM type: NRG; PAM sequence: AAG
  source 1..20: mol_type = other DNA
ggcagcaggtccagaacggg

SEQ ID NO: 8021 - DNA, 20 bp, synthetic construct
  misc_feature 1..20: note = Description of Artificial Sequence: Synthetic oligonucleotide
  misc_feature 1..20: note = Target: ANGPTL4; (-) strand; PAM type: NRG; PAM sequence: GGG
  source 1..20: mol_type = other DNA
tgaggcagcaggtccagaac

SEQ ID NO: 8022 - DNA, 20 bp, synthetic construct
  misc_feature 1..20: note = Description of Artificial Sequence: Synthetic oligonucleotide
  misc_feature 1..20: note = Target: ANGPTL4; (-) strand; PAM type: NRG; PAM sequence: CGG
  source 1..20: mol_type = other DNA
atgaggcagcaggtccagaa

SEQ ID NO: 8023 - DNA, 20 bp, synthetic construct
  misc_feature 1..20: note = Description of Artificial Sequence: Synthetic oligonucleotide
  misc_feature 1..20: note = Target: ANGPTL4; (-) strand; PAM type: NRG; PAM sequence: CAG
  source 1..20: mol_type = other DNA
aatgaatgaggcagcaggtc

SEQ ID NO: 8024 - DNA, 20 bp, synthetic construct
  misc_feature 1..20: note = Description of Artificial Sequence: Synthetic oligonucleotide
  misc_feature 1..20: note = Target: ANGPTL4; (-) strand; PAM type: NRG; PAM sequence: AGG
  source 1..20: mol_type = other DNA
gaatgaatgaatgaggcagc

SEQ ID NO: 8025 - DNA, 20 bp, synthetic construct
  misc_feature 1..20: note = Description of Artificial Sequence: Synthetic oligonucleotide
  misc_feature 1..20: note = Target: ANGPTL4; (-) strand; PAM type: NRG; PAM sequence: CAG
  source 1..20: mol_type = other DNA
tgaatgaatgaatgaggcag

SEQ ID NO: 8026 - DNA, 20 bp, synthetic construct
  misc_feature 1..20: note = Description of Artificial Sequence: Synthetic oligonucleotide
  misc_feature 1..20: note = Target: ANGPTL4; (-) strand; PAM type: NRG; PAM sequence: CAG
  source 1..20: mol_type = other DNA
gaatgaatgaatgaatgagg

SEQ ID NO: 8027 - DNA, 20 bp, synthetic construct
  misc_feature 1..20: note = Description of Artificial Sequence: Synthetic oligonucleotide
  misc_feature 1..20: note = Target: ANGPTL4; (-) strand; PAM type: NRG; PAM sequence: AGG
  source 1..20: mol_type = other DNA
aatgaatgaatgaatgaatg

SEQ ID NO: 8028 - DNA, 20 bp, synthetic construct
  misc_feature 1..20: note = Description of Artificial Sequence: Synthetic oligonucleotide
  misc_feature 1..20: note = Target: ANGPTL4; (-) strand; PAM type: NRG; PAM sequence: GAG
  source 1..20: mol_type = other DNA
gaatgaatgaatgaatgaat

SEQ ID NO: 8029 - DNA, 20 bp, synthetic construct
  misc_feature 1..20: note = Description of Artificial Sequence: Synthetic oligonucleotide
  misc_feature 1..20: note = Target: ANGPTL4; (-) strand; PAM type: NRG; PAM sequence: CAG
  source 1..20: mol_type = other DNA
gtctcaaaaagcaaacaaaa

SEQ ID NO: 8030 - DNA, 20 bp, synthetic construct
  misc_feature 1..20: note = Description of Artificial Sequence: Synthetic oligonucleotide
  misc_feature 1..20: note = Target: ANGPTL4; (-) strand; PAM type: NRG; PAM sequence: AAG
  source 1..20: mol_type = other DNA
gagcgagactccgtctcaaa

SEQ ID NO: 8031 - DNA, 20 bp, synthetic construct
  misc_feature 1..20: note = Description of Artificial Sequence: Synthetic oligonucleotide
  misc_feature 1..20: note = Target: ANGPTL4; (-) strand; PAM type: NRG; PAM sequence: GAG
  source 1..20: mol_type = other DNA
tccagcctggacaacagagc

SEQ ID NO: 8032 - DNA, 20 bp, synthetic construct
  misc_feature 1..20: note = Description of Artificial Sequence: Synthetic oligonucleotide
  misc_feature 1..20: note = Target: ANGPTL4; (-) strand; PAM type: NRG; PAM sequence: GAG
  source 1..20: mol_type = other DNA
gcactccagcctggacaaca

SEQ ID NO: 8033 - DNA, 20 bp, synthetic construct
  misc_feature 1..20: note = Description of Artificial Sequence: Synthetic oligonucleotide
  misc_feature 1..20: note = Target: ANGPTL4; (-) strand; PAM type: NRG; PAM sequence: CAG
  source 1..20: mol_type = other DNA
ctgcactccagcctggacaa

SEQ ID NO: 8034 - DNA, 20 bp, synthetic construct
  misc_feature 1..20: note = Description of Artificial Sequence: Synthetic oligonucleotide
  misc_feature 1..20: note = Target: ANGPTL4; (-) strand; PAM type: NRG; PAM sequence: TGG
  source 1..20: mol_type = other DNA
tgcgccactgcactccagcc

SEQ ID NO: 8035 - DNA, 20 bp, synthetic construct
  misc_feature 1..20: note = Description of Artificial Sequence: Synthetic oligonucleotide
  misc_feature 1..20: note = Target: ANGPTL4; (-) strand; PAM type: NRG; PAM sequence: CAG
  source 1..20: mol_type = other DNA
gagattgcgccactgcactc

SEQ ID NO: 8036 - DNA, 20 bp, synthetic construct
  misc_feature 1..20: note = Description of Artificial Sequence: Synthetic oligonucleotide
  misc_feature 1..20: note = Target: ANGPTL4; (-) strand; PAM type: NRG; PAM sequence: GAG
  source 1..20: mol_type = other DNA
ggcagaggttgcagtgagct

SEQ ID NO: 8037 - DNA, 20 bp, synthetic construct
  misc_feature 1..20: note = Description of Artificial Sequence: Synthetic oligonucleotide
  misc_feature 1..20: note = Target: ANGPTL4; (-) strand; PAM type: NRG; PAM sequence: GAG
  source 1..20: mol_type = other DNA
tgggaggcagaggttgcagt

SEQ ID NO: 8038 - DNA, 20 bp, synthetic construct
  misc_feature 1..20: note = Description of Artificial Sequence: Synthetic oligonucleotide
  misc_feature 1..20: note = Target: ANGPTL4; (-) strand; PAM type: NRG; PAM sequence: CAG
  source 1..20: mol_type = other DNA
ccagtgggaggcagaggttg

SEQ ID NO: 8039 - DNA, 20 bp, synthetic construct
  misc_feature 1..20: note = Description of Artificial Sequence: Synthetic oligonucleotide
  misc_feature 1..20: note = Target: ANGPTL4; (-) strand; PAM type: NRG; PAM sequence: AGG
  source 1..20: mol_type = other DNA
ttgaacccagtgggaggcag

SEQ ID NO: 8040 - DNA, 20 bp, synthetic construct
  misc_feature 1..20: note = Description of Artificial Sequence: Synthetic oligonucleotide
  misc_feature 1..20: note = Target: ANGPTL4; (-) strand; PAM type: NRG; PAM sequence: GAG
  source 1..20: mol_type = other DNA
cttgaacccagtgggaggca

SEQ ID NO: 8041 - DNA, 20 bp, synthetic construct
  misc_feature 1..20: note = Description of Artificial Sequence: Synthetic oligonucleotide
  misc_feature 1..20: note = Target: ANGPTL4; (-) strand; PAM type: NRG; PAM sequence: CAG
  source 1..20: mol_type = other DNA
cacttgaacccagtgggagg

SEQ ID NO: 8042 - DNA, 20 bp, synthetic construct
  misc_feature 1..20: note = Description of Artificial Sequence: Synthetic oligonucleotide
  misc_feature 1..20: note = Target: ANGPTL4; (-) strand; PAM type: NRG; PAM sequence: AGG
  source 1..20: mol_type = other DNA
aatcacttgaacccagtggg

SEQ ID NO: 8043 - DNA, 20 bp, synthetic construct
  misc_feature 1..20: note = Description of Artificial Sequence: Synthetic oligonucleotide
  misc_feature 1..20: note = Target: ANGPTL4; (-) strand; PAM type: NRG; PAM sequence: GAG
  source 1..20: mol_type = other DNA
gaatcacttgaacccagtgg

SEQ ID NO: 8044 - DNA, 20 bp, synthetic construct
  misc_feature 1..20: note = Description of Artificial Sequence: Synthetic oligonucleotide
  misc_feature 1..20: note = Target: ANGPTL4; (-) strand; PAM type: NRG; PAM sequence: GGG
  source 1..20: mol_type = other DNA
gagaatcacttgaacccagt

SEQ ID NO: 8045 - DNA, 20 bp, synthetic construct
  misc_feature 1..20: note = Description of Artificial Sequence: Synthetic oligonucleotide
  misc_feature 1..20: note = Target: ANGPTL4; (-) strand; PAM type: NRG; PAM sequence: TGG
  source 1..20: mol_type = other DNA
ggagaatcacttgaacccag

SEQ ID NO: 8046 - DNA, 20 bp, synthetic construct
  misc_feature 1..20: note = Description of Artificial Sequence: Synthetic oligonucleotide
  misc_feature 1..20: note = Target: ANGPTL4; (-) strand; PAM type: NRG; PAM sequence: CAG
  source 1..20: mol_type = other DNA
gcaggagaatcacttgaacc

SEQ ID NO: 8047 - DNA, 20 bp, synthetic construct
  misc_feature 1..20: note = Description of Artificial Sequence: Synthetic oligonucleotide
  misc_feature 1..20: note = Target: ANGPTL4; (-) strand; PAM type: NRG; PAM sequence: GAG
  source 1..20: mol_type = other DNA
tacttgagaggctgaggcag

SEQ ID NO: 8048 - DNA, 20 bp, synthetic construct
  misc_feature 1..20: note = Description of Artificial Sequence: Synthetic oligonucleotide
  misc_feature 1..20: note = Target: ANGPTL4; (-) strand; PAM type: NRG; PAM sequence: AGG
  source 1..20: mol_type = other DNA
tctacttgagaggctgaggc

SEQ ID NO: 8049 - DNA, 20 bp, synthetic construct
  misc_feature 1..20: note = Description of Artificial Sequence: Synthetic oligonucleotide
  misc_feature 1..20: note = Target: ANGPTL4; (-) strand; PAM type: NRG; PAM sequence: CAG
  source 1..20: mol_type = other DNA
atctacttgagaggctgagg

SEQ ID NO: 8050 - DNA, 20 bp, synthetic construct
  misc_feature 1..20: note = Description of Artificial Sequence: Synthetic oligonucleotide
  misc_feature 1..20: note = Target: ANGPTL4; (-) strand; PAM type: NRG; PAM sequence: AGG
  source 1..20: mol_type = other DNA
cccatctacttgagaggctg

SEQ ID NO: 8051 - DNA, 20 bp, synthetic construct
  misc_feature 1..20: note = Description of Artificial Sequence: Synthetic oligonucleotide
  misc_feature 1..20: note = Target: ANGPTL4; (-) strand; PAM type: NRG; PAM sequence: GAG
  source 1..20: mol_type = other DNA
tcccatctacttgagaggct

SEQ ID NO: 8052 - DNA, 20 bp, synthetic construct
  misc_feature 1..20: note = Description of Artificial Sequence: Synthetic oligonucleotide
  misc_feature 1..20: note = Target: ANGPTL4; (-) strand; PAM type: NRG; PAM sequence: AGG
  source 1..20: mol_type = other DNA
tataatcccatctacttgag

SEQ ID NO: 8053 - DNA, 20 bp, synthetic construct
  misc_feature 1..20: note = Description of Artificial Sequence: Synthetic oligonucleotide
  misc_feature 1..20: note = Target: ANGPTL4; (-) strand; PAM type: NRG; PAM sequence: GAG
  source 1..20: mol_type = other DNA
ctataatcccatctacttga

SEQ ID NO: 8054 - DNA, 20 bp, synthetic construct
  misc_feature 1..20: note = Description of Artificial Sequence: Synthetic oligonucleotide
  misc_feature 1..20: note = Target: ANGPTL4; (-) strand; PAM type: NRG; PAM sequence: GAG
  source 1..20: mol_type = other DNA
gcctataatcccatctactt

SEQ ID NO: 8055 - DNA, 20 bp, synthetic construct
  misc_feature 1..20: note = Description of Artificial Sequence: Synthetic oligonucleotide
  misc_feature 1..20: note = Target: ANGPTL4; (-) strand; PAM type: NRG; PAM sequence: AGG
  source 1..20: mol_type = other DNA
tagctgggcgtggtggcggt

SEQ ID NO: 8056 - DNA, 20 bp, synthetic construct
  misc_feature 1..20: note = Description of Artificial Sequence: Synthetic oligonucleotide
  misc_feature 1..20: note = Target: ANGPTL4; (-) strand; PAM type: NRG; PAM sequence: TAG
  source 1..20: mol_type = other DNA
ttagctgggcgtggtggcgg

SEQ ID NO: 8057 - DNA, 20 bp, synthetic construct
  misc_feature 1..20: note = Description of Artificial Sequence: Synthetic oligonucleotide
  misc_feature 1..20: note = Target: ANGPTL4; (-) strand; PAM type: NRG; PAM sequence: CGG
  source 1..20: mol_type = other DNA
aaattagctgggcgtggtgg

SEQ ID NO: 8058 - DNA, 20 bp, synthetic construct
  misc_feature 1..20: note = Description of Artificial Sequence: Synthetic oligonucleotide
  misc_feature 1..20: note = Target: ANGPTL4; (-) strand; PAM type: NRG; PAM sequence: TGG
  source 1..20: mol_type = other DNA
taaaaattagctgggcgtgg

SEQ ID NO: 8059 - DNA, 20 bp, synthetic construct
  misc_feature 1..20: note = Description of Artificial Sequence: Synthetic oligonucleotide
  misc_feature 1..20: note = Target: ANGPTL4; (-) strand; PAM type: NRG; PAM sequence: TGG
  source 1..20: mol_type = other DNA
gaataaaaattagctgggcg

SEQ ID NO: 8060 - DNA, 20 bp, synthetic construct
  misc_feature 1..20: note = Description of Artificial Sequence: Synthetic oligonucleotide
  misc_feature 1..20: note = Target: ANGPTL4; (-) strand; PAM type: NRG; PAM sequence: GGG
  source 1..20: mol_type = other DNA
taaatgaataaaaattagct

SEQ ID NO: 8061 - DNA, 20 bp, synthetic construct
  misc_feature 1..20: note = Description of Artificial Sequence: Synthetic oligonucleotide
  misc_feature 1..20: note = Target: ANGPTL4; (-) strand; PAM type: NRG; PAM sequence: TGG
  source 1..20: mol_type = other DNA
ataaatgaataaaaattagc

SEQ ID NO: 8062 - DNA, 20 bp, synthetic construct
  misc_feature 1..20: note = Description of Artificial Sequence: Synthetic oligonucleotide
  misc_feature 1..20: note = Target: ANGPTL4; (-) strand; PAM type: NRG; PAM sequence: TAG
  source 1..20: mol_type = other DNA
cttgataaatgaataaaaat

SEQ ID NO: 8063 - DNA, 20 bp, synthetic construct
  misc_feature 1..20: note = Description of Artificial Sequence: Synthetic oligonucleotide
  misc_feature 1..20: note = Target: ANGPTL4; (-) strand; PAM type: NRG; PAM sequence: AAG
  source 1..20: mol_type = other DNA
actctgtctcaaaaaaaaaa

SEQ ID NO: 8064 - DNA, 20 bp, synthetic construct
  misc_feature 1..20: note = Description of Artificial Sequence: Synthetic oligonucleotide
  misc_feature 1..20: note = Target: ANGPTL4; (-) strand; PAM type: NRG; PAM sequence: GAG
  source 1..20: mol_type = other DNA
tccaacctgggtgacagagt

SEQ ID NO: 8065 - DNA, 20 bp, synthetic construct
  misc_feature 1..20: note = Description of Artificial Sequence: Synthetic oligonucleotide
  misc_feature 1..20: note = Target: ANGPTL4; (-) strand; PAM type: NRG; PAM sequence: GAG
  source 1..20: mol_type = other DNA
gcactccaacctgggtgaca

SEQ ID NO: 8066 - DNA, 20 bp, synthetic construct
  misc_feature 1..20: note = Description of Artificial Sequence: Synthetic oligonucleotide
  misc_feature 1..20: note = Target: ANGPTL4; (-) strand; PAM type: NRG; PAM sequence: CAG
  source 1..20: mol_type = other DNA
ttgcactccaacctgggtga

SEQ ID NO: 8067 - DNA, 20 bp, synthetic construct
  misc_feature 1..20: note = Description of Artificial Sequence: Synthetic oligonucleotide
  misc_feature 1..20: note = Target: ANGPTL4; (-) strand; PAM type: NRG; PAM sequence: GGG
  source 1..20: mol_type = other DNA
gaaccattgcactccaacct

SEQ ID NO: 8068 - DNA, 20 bp, synthetic construct
  misc_feature 1..20: note = Description of Artificial Sequence: Synthetic oligonucleotide
  misc_feature 1..20: note = Target: ANGPTL4; (-) strand; PAM type: NRG; PAM sequence: TGG
  source 1..20: mol_type = other DNA
tgaaccattgcactccaacc

SEQ ID NO: 8069 - DNA, 20 bp, synthetic construct
  misc_feature 1..20: note = Description of Artificial Sequence: Synthetic oligonucleotide
  misc_feature 1..20: note = Target: ANGPTL4; (-) strand; PAM type: NRG; PAM sequence: AGG
  source 1..20: mol_type = other DNA
gcagaggttgcagtcagctg

SEQ ID NO: 8070 - DNA, 20 bp, synthetic construct
  misc_feature 1..20: note = Description of Artificial Sequence: Synthetic oligonucleotide
  misc_feature 1..20: note = Target: ANGPTL4; (-) strand; PAM type: NRG; PAM sequence: GAG
  source 1..20: mol_type = other DNA
ggcagaggttgcagtcagct

SEQ ID NO: 8071 - DNA, 20 bp, synthetic construct
  misc_feature 1..20: note = Description of Artificial Sequence: Synthetic oligonucleotide
  misc_feature 1..20: note = Target: ANGPTL4; (-) strand; PAM type: NRG; PAM sequence: CAG
  source 1..20: mol_type = other DNA
cgggaggcagaggttgcagt

SEQ ID NO: 8072 - DNA, 20 bp, synthetic construct
  misc_feature 1..20: note = Description of Artificial Sequence: Synthetic oligonucleotide
  misc_feature 1..20: note = Target: ANGPTL4; (-) strand; PAM type: NRG; PAM sequence: CAG
  source 1..20: mol_type = other DNA
aacccgggaggcagaggttg

SEQ ID NO: 8073 - DNA, 20 bp, synthetic construct
  misc_feature 1..20: note = Description of Artificial Sequence: Synthetic oligonucleotide
  misc_feature 1..20: note = Target: ANGPTL4; (-) strand; PAM type: NRG; PAM sequence: AGG
  source 1..20: mol_type = other DNA
cacttgaacccgggaggcag

SEQ ID NO: 8074 - DNA, 20 bp, synthetic construct
  misc_feature 1..20: note = Description of Artificial Sequence: Synthetic oligonucleotide
  misc_feature 1..20: note = Target: ANGPTL4; (-) strand; PAM type: NRG; PAM sequence: GAG
  source 1..20: mol_type = other DNA
tcacttgaacccgggaggca

SEQ ID NO: 8075 - DNA, 20 bp, synthetic construct
  misc_feature 1..20: note = Description of Artificial Sequence: Synthetic oligonucleotide
  misc_feature 1..20: note = Target: ANGPTL4; (-) strand; PAM type: NRG; PAM sequence: CAG
  source 1..20: mol_type = other DNA
aatcacttgaacccgggagg

SEQ ID NO: 8076 - DNA, 20 bp, synthetic construct
  misc_feature 1..20: note = Description of Artificial Sequence: Synthetic oligonucleotide
  misc_feature 1..20: note = Target: ANGPTL4; (-) strand; PAM type: NRG; PAM sequence: AGG
  source 1..20: mol_type = other DNA
gagaatcacttgaacccggg

SEQ ID NO: 8077 - DNA, 20 bp, synthetic construct
  misc_feature 1..20: note = Description of Artificial Sequence: Synthetic oligonucleotide
  misc_feature 1..20: note = Target: ANGPTL4; (-) strand; PAM type: NRG; PAM sequence: GAG
  source 1..20: mol_type = other DNA
ggagaatcacttgaacccgg

SEQ ID NO: 8078 - DNA, 20 bp, synthetic construct
  misc_feature 1..20: note = Description of Artificial Sequence: Synthetic oligonucleotide
  misc_feature 1..20: note = Target: ANGPTL4; (-) strand; PAM type: NRG; PAM sequence: GGG
  source 1..20: mol_type = other DNA
caggagaatcacttgaaccc

SEQ ID NO: 8079 - DNA, 20 bp, synthetic construct
  misc_feature 1..20: note = Description of Artificial Sequence: Synthetic oligonucleotide
  misc_feature 1..20: note = Target: ANGPTL4; (-) strand; PAM type: NRG; PAM sequence: CGG
  source 1..20: mol_type = other DNA
gcaggagaatcacttgaacc

SEQ ID NO: 8080 - DNA, 20 bp, synthetic construct
  misc_feature 1..20: note = Description of Artificial Sequence: Synthetic oligonucleotide
  misc_feature 1..20: note = Target: ANGPTL4; (-) strand; PAM type: NRG; PAM sequence: GAG
  source 1..20: mol_type = other DNA
tccttaggaggcagaggcag

SEQ ID NO: 8081 - DNA, 20 bp, synthetic construct
  misc_feature 1..20: note = Description of Artificial Sequence: Synthetic oligonucleotide
  misc_feature 1..20: note = Target: ANGPTL4; (-) strand; PAM type: NRG; PAM sequence: AGG
  source 1..20: mol_type = other DNA
gctccttaggaggcagaggc

SEQ ID NO: 8082 - DNA, 20 bp, synthetic construct
  misc_feature 1..20: note = Description of Artificial Sequence: Synthetic oligonucleotide
  misc_feature 1..20: note = Target: ANGPTL4; (-) strand; PAM type: NRG; PAM sequence: CAG
  source 1..20: mol_type = other DNA
agctccttaggaggcagagg

SEQ ID NO: 8083 - DNA, 20 bp, synthetic construct
  misc_feature 1..20: note = Description of Artificial Sequence: Synthetic oligonucleotide
  misc_feature 1..20: note = Target: ANGPTL4; (-) strand; PAM type: NRG; PAM sequence: AGG
  source 1..20: mol_type = other DNA
cccagctccttaggaggcag

SEQ ID NO: 8084 - DNA, 20 bp, synthetic construct
  misc_feature 1..20: note = Description of Artificial Sequence: Synthetic oligonucleotide
  misc_feature 1..20: note = Target: ANGPTL4; (-) strand; PAM type: NRG; PAM sequence: GAG
  source 1..20: mol_type = other DNA
tcccagctccttaggaggca

SEQ ID NO: 8085 - DNA, 20 bp, synthetic construct
  misc_feature 1..20: note = Description of Artificial Sequence: Synthetic oligonucleotide
  misc_feature 1..20: note = Target: ANGPTL4; (-) strand; PAM type: NRG; PAM sequence: CAG
  source 1..20: mol_type = other DNA
aatcccagctccttaggagg

SEQ ID NO: 8086 - DNA, 20 bp, synthetic construct
  misc_feature 1..20: note = Description of Artificial Sequence: Synthetic oligonucleotide
  misc_feature 1..20: note = Target: ANGPTL4; (-) strand; PAM type: NRG; PAM sequence: AGG
  source 1..20: mol_type = other DNA
agtaatcccagctccttagg

SEQ ID NO: 8087 - DNA, 20 bp, synthetic construct
  misc_feature 1..20: note = Description of Artificial Sequence: Synthetic oligonucleotide
  misc_feature 1..20: note = Target: ANGPTL4; (-) strand; PAM type: NRG; PAM sequence: GAG
  source 1..20: mol_type = other DNA
cagtaatcccagctccttag

SEQ ID NO: 8088 - DNA, 20 bp, synthetic construct
  misc_feature 1..20: note = Description of Artificial Sequence: Synthetic oligonucleotide
  misc_feature 1..20: note = Target: ANGPTL4; (-) strand; PAM type: NRG; PAM sequence: AGG
  source 1..20: mol_type = other DNA
gccagtaatcccagctcctt

SEQ ID NO: 8089 - DNA, 20 bp, synthetic construct
  misc_feature 1..20: note = Description of Artificial Sequence: Synthetic oligonucleotide
  misc_feature 1..20: note = Target: ANGPTL4; (-) strand; PAM type: NRG; PAM sequence: TAG
  source 1..20: mol_type = other DNA
cgccagtaatcccagctcct

SEQ ID NO: 8090 - DNA, 20 bp, synthetic construct
  misc_feature 1..20: note = Description of Artificial Sequence: Synthetic oligonucleotide
  misc_feature 1..20: note = Target: ANGPTL4; (-) strand; PAM type: NRG; PAM sequence: CAG
  source 1..20: mol_type = other DNA
atggtggacgccagtaatcc

SEQ ID NO: 8091 - DNA, 20 bp, synthetic construct
  misc_feature 1..20: note = Description of Artificial Sequence: Synthetic oligonucleotide
  misc_feature 1..20: note = Target: ANGPTL4; (-) strand; PAM type: NRG; PAM sequence: CAG
  source 1..20: mol_type = other DNA
ctgggtgtgatggtggacgc

SEQ ID NO: 8092 - DNA, 20 bp, synthetic construct
  misc_feature 1..20: note = Description of Artificial Sequence: Synthetic oligonucleotide
  misc_feature 1..20: note = Target: ANGPTL4; (-) strand; PAM type: NRG; PAM sequence: TGG
  source 1..20: mol_type = other DNA
agattagctgggtgtgatgg

SEQ ID NO: 8093 - DNA, 20 bp, synthetic construct
  misc_feature 1..20: note = Description of Artificial Sequence: Synthetic oligonucleotide
  misc_feature 1..20: note = Target: ANGPTL4; (-) strand; PAM type: NRG; PAM sequence: TGG
  source 1..20: mol_type = other DNA
caaagattagctgggtgtga

SEQ ID NO: 8094 - DNA, 20 bp, synthetic construct
  misc_feature 1..20: note = Description of Artificial Sequence: Synthetic oligonucleotide
  misc_feature 1..20: note = Target: ANGPTL4; (-) strand; PAM type: NRG; PAM sequence: GGG
  source 1..20: mol_type = other DNA
aaaacatacaaagattagct

SEQ ID NO: 8095 - DNA, 20 bp, synthetic construct
  misc_feature 1..20: note = Description of Artificial Sequence: Synthetic oligonucleotide
  misc_feature 1..20: note = Target: ANGPTL4; (-) strand; PAM type: NRG; PAM sequence: TGG
  source 1..20: mol_type = other DNA
taaaacatacaaagattagc

SEQ ID NO: 8096 - DNA, 20 bp, synthetic construct
  misc_feature 1..20: note = Description of Artificial Sequence: Synthetic oligonucleotide
  misc_feature 1..20: note = Target: ANGPTL4; (-) strand; PAM type: NRG; PAM sequence: TAG
  source 1..20: mol_type = other DNA
ctagtaaaacatacaaagat

SEQ ID NO: 8097 - DNA, 20 bp, synthetic construct
  misc_feature 1..20: note = Description of Artificial Sequence: Synthetic oligonucleotide
  misc_feature 1..20: note = Target: ANGPTL4; (-) strand; PAM type: NRG; PAM sequence: AAG
  source 1..20: mol_type = other DNA
catctctagtaaaacataca

SEQ ID NO: 8098 - DNA, 20 bp, synthetic construct
  misc_feature 1..20: note = Description of Artificial Sequence: Synthetic oligonucleotide
  misc_feature 1..20: note = Target: ANGPTL4; (-) strand; PAM type: NRG; PAM sequence: TAG
  source 1..20: mol_type = other DNA
acatggccaaaccccatctc

SEQ ID NO: 8099 - DNA, 20 bp, synthetic construct
  misc_feature 1..20: note = Description of Artificial Sequence: Synthetic oligonucleotide
  misc_feature 1..20: note = Target: ANGPTL4; (-) strand; PAM type: NRG; PAM sequence: TGG
  source 1..20: mol_type = other DNA
tgagaccagcctggtcaaca

SEQ ID NO: 8100 - DNA, 20 bp, synthetic construct
  misc_feature 1..20: note = Description of Artificial Sequence: Synthetic oligonucleotide
  misc_feature 1..20: note = Target: ANGPTL4; (-) strand; PAM type: NRG; PAM sequence: TGG
  source 1..20: mol_type = other DNA
tcaggagtttgagaccagcc

SEQ ID NO: 8101 - DNA, 20 bp, synthetic construct
  misc_feature 1..20: note = Description of Artificial Sequence: Synthetic oligonucleotide
  misc_feature 1..20: note = Target: ANGPTL4; (-) strand; PAM type: NRG; PAM sequence: CAG
  source 1..20: mol_type = other DNA
atcggtcaggagtttgagac

SEQ ID NO: 8102 - DNA, 20 bp, synthetic construct
  misc_feature 1..20: note = Description of Artificial Sequence: Synthetic oligonucleotide
  misc_feature 1..20: note = Target: ANGPTL4; (-) strand; PAM type: NRG; PAM sequence: GAG
  source 1..20: mol_type = other DNA
ggcggatcggtcaggagttt

SEQ ID NO: 8103 - DNA, 20 bp, synthetic construct
  misc_feature 1..20: note = Description of Artificial Sequence: Synthetic oligonucleotide
  misc_feature 1..20: note = Target: ANGPTL4; (-) strand; PAM type: NRG; PAM sequence: GAG
  source 1..20: mol_type = other DNA
gaggcgggcggatcggtcag

SEQ ID NO: 8104 - DNA, 20 bp, synthetic construct
  misc_feature 1..20: note = Description of Artificial Sequence: Synthetic oligonucleotide
  misc_feature 1..20: note = Target: ANGPTL4; (-) strand; PAM type: NRG; PAM sequence: AGG
  source 1..20: mol_type = other DNA
gggaggcgggcggatcggtc

SEQ ID NO: 8105 - DNA, 20 bp, synthetic construct
  misc_feature 1..20: note = Description of Artificial Sequence: Synthetic oligonucleotide
  misc_feature 1..20: note = Target: ANGPTL4; (-) strand; PAM type: NRG; PAM sequence: CAG
  source 1..20: mol_type = other DNA
tgggaggcgggcggatcggt

SEQ ID NO: 8106 - DNA, 20 bp, synthetic construct
  misc_feature 1..20: note = Description of Artificial Sequence: Synthetic oligonucleotide
  misc_feature 1..20: note = Target: ANGPTL4; (-) strand; PAM type: NRG; PAM sequence: CGG
  source 1..20: mol_type = other DNA
actttgggaggcgggcggat

SEQ ID NO: 8107 - DNA, 20 bp, synthetic construct
  misc_feature 1..20: note = Description of Artificial Sequence: Synthetic oligonucleotide
  misc_feature 1..20: note = Target: ANGPTL4; (-) strand; PAM type: NRG; PAM sequence: CGG
  source 1..20: mol_type = other DNA
ccagcactttgggaggcggg

SEQ ID NO: 8108 - DNA, 20 bp, synthetic construct
  misc_feature 1..20: note = Description of Artificial Sequence: Synthetic oligonucleotide
  misc_feature 1..20: note = Target: ANGPTL4; (-) strand; PAM type: NRG; PAM sequence: GGG
  source 1..20: mol_type = other DNA
aatccagcactttgggaggc

SEQ ID NO: 8109 - DNA, 20 bp, synthetic construct
  misc_feature 1..20: note = Description of Artificial Sequence: Synthetic oligonucleotide
  misc_feature 1..20: note = Target: ANGPTL4; (-) strand; PAM type: NRG; PAM sequence: CGG
  source 1..20: mol_type = other DNA
taatccagcactttgggagg

SEQ ID NO: 8110 - DNA, 20 bp, synthetic construct
  misc_feature 1..20: note = Description of Artificial Sequence: Synthetic oligonucleotide
  misc_feature 1..20: note = Target: ANGPTL4; (-) strand; PAM type: NRG; PAM sequence: AGG
  source 1..20: mol_type = other DNA
ctgtaatccagcactttggg

SEQ ID NO: 8111 - DNA, 20 bp, synthetic construct
  misc_feature 1..20: note = Description of Artificial Sequence: Synthetic oligonucleotide
  misc_feature 1..20: note = Target: ANGPTL4; (-) strand; PAM type: NRG; PAM sequence: GAG
  source 1..20: mol_type = other DNA
cctgtaatccagcactttgg

SEQ ID NO: 8112 - DNA, 20 bp, synthetic construct
  misc_feature 1..20: note = Description of Artificial Sequence: Synthetic oligonucleotide
  misc_feature 1..20: note = Target: ANGPTL4; (-) strand; PAM type: NRG; PAM sequence: GGG
  source 1..20: mol_type = other DNA
tgcctgtaatccagcacttt

SEQ ID NO: 8113 - DNA, 20 bp, synthetic construct
  misc_feature 1..20: note = Description of Artificial Sequence: Synthetic oligonucleotide
  misc_feature 1..20: note = Target: ANGPTL4; (-) strand; PAM type: NRG; PAM sequence: TGG
  source 1..20: mol_type = other DNA
atgcctgtaatccagcactt

SEQ ID NO: 8114 - DNA, 20 bp, synthetic construct
  misc_feature 1..20: note = Description of Artificial Sequence: Synthetic oligonucleotide
  misc_feature 1..20: note = Target: ANGPTL4; (-) strand; PAM type: NRG; PAM sequence: CAG
  source 1..20: mol_type = other DNA
agtggttcatgcctgtaatc

SEQ ID NO: 8115 - DNA, 20 bp, synthetic construct
  misc_feature 1..20: note = Description of Artificial Sequence: Synthetic oligonucleotide
  misc_feature 1..20: note = Target: ANGPTL4; (-) strand; PAM type: NRG; PAM sequence: TGG
  source 1..20: mol_type = other DNA
gaggaatgggccgggcgcag

SEQ ID NO: 8116 - DNA, 20 bp, synthetic construct
  misc_feature 1..20: note = Description of Artificial Sequence: Synthetic oligonucleotide
  misc_feature 1..20: note = Target: ANGPTL4; (-) strand; PAM type: NRG; PAM sequence: CAG
  source 1..20: mol_type = other DNA
cttgaggaatgggccgggcg

SEQ ID NO: 8117 - DNA, 20 bp, synthetic construct
  misc_feature 1..20: note = Description of Artificial Sequence: Synthetic oligonucleotide
  misc_feature 1..20: note = Target: ANGPTL4; (-) strand; PAM type: NRG; PAM sequence: GGG
  source 1..20: mol_type = other DNA
aaagacttgaggaatgggcc

SEQ ID NO: 8118 - DNA, 20 bp, synthetic construct
  misc_feature 1..20: note = Description of Artificial Sequence: Synthetic oligonucleotide
  misc_feature 1..20: note = Target: ANGPTL4; (-) strand; PAM type: NRG; PAM sequence: CGG
  source 1..20: mol_type = other DNA
taaagacttgaggaatgggc

SEQ ID NO: 8119 - DNA, 20 bp, synthetic construct
  misc_feature 1..20: note = Description of Artificial Sequence: Synthetic oligonucleotide
  misc_feature 1..20: note = Target: ANGPTL4; (-) strand; PAM type: NRG; PAM sequence: GGG
  source 1..20: mol_type = other DNA
tcaataaagacttgaggaat

SEQ ID NO: 8120 - DNA, 20 bp, synthetic construct
  misc_feature 1..20: note = Description of Artificial Sequence: Synthetic oligonucleotide
  misc_feature 1..20: note = Target: ANGPTL4; (-) strand; PAM type: NRG; PAM sequence: TGG
  source 1..20: mol_type = other DNA
ctcaataaagacttgaggaa

SEQ ID NO: 8121 - DNA, 20 bp, synthetic construct
  misc_feature 1..20: note = Description of Artificial Sequence: Synthetic oligonucleotide
  misc_feature 1..20: note = Target: ANGPTL4; (-) strand; PAM type: NRG; PAM sequence: AGG
  source 1..20: mol_type = other DNA
agctgctcaataaagacttg

SEQ ID NO: 8122 - DNA, 20 bp, synthetic construct
  misc_feature 1..20: note = Description of Artificial Sequence: Synthetic oligonucleotide
  misc_feature 1..20: note = Target: ANGPTL4; (-) strand; PAM type: NRG; PAM sequence: GAG
  source 1..20: mol_type = other DNA
cagctgctcaataaagactt

SEQ ID NO: 8123 - DNA, 20 bp, synthetic construct
  misc_feature 1..20: note = Description of Artificial Sequence: Synthetic oligonucleotide
  misc_feature 1..20: note = Target: ANGPTL4; (-) strand; PAM type: NRG; PAM sequence: AAG
  source 1..20: mol_type = other DNA
cgcatagcagctgctcaata

SEQ ID NO: 8124 - DNA, 20 bp, synthetic construct
  misc_feature 1..20: note = Description of Artificial Sequence: Synthetic oligonucleotide
  misc_feature 1..20: note = Target: ANGPTL4; (-) strand; PAM type: NRG; PAM sequence: CAG
  source 1..20: mol_type = other DNA
acgcaggccccagcgcatag

SEQ ID NO: 8125 - DNA, 20 bp, synthetic construct
  misc_feature 1..20: note = Description of Artificial Sequence: Synthetic oligonucleotide
  misc_feature 1..20: note = Target: ANGPTL4; (-) strand; PAM type: NRG; PAM sequence: TAG
  source 1..20: mol_type = other DNA
tccacgcaggccccagcgca

SEQ ID NO: 8126 - DNA, 20 bp, synthetic construct
  misc_feature 1..20: note = Description of Artificial Sequence: Synthetic oligonucleotide
  misc_feature 1..20: note = Target: ANGPTL4; (-) strand; PAM type: NRG; PAM sequence: CAG
  source 1..20: mol_type = other DNA
accagcatccacgcaggccc

SEQ ID NO: 8127 - DNA, 20 bp, synthetic construct
  misc_feature 1..20: note = Description of Artificial Sequence: Synthetic oligonucleotide
  misc_feature 1..20: note = Target: ANGPTL4; (-) strand; PAM type: NRG; PAM sequence: AGG
  source 1..20: mol_type = other DNA
cctggcaccagcatccacgc

SEQ ID NO: 8128 - DNA, 20 bp, synthetic construct
  misc_feature 1..20: note = Description of Artificial Sequence: Synthetic oligonucleotide
  misc_feature 1..20: note = Target: ANGPTL4; (-) strand; PAM type: NRG; PAM sequence: CAG
  source 1..20: mol_type = other DNA
gcctggcaccagcatccacg

SEQ ID NO: 8129 - DNA, 20 bp, synthetic construct
  misc_feature 1..20: note = Description of Artificial Sequence: Synthetic oligonucleotide
  misc_feature 1..20: note = Target: ANGPTL4; (-) strand; PAM type: NRG; PAM sequence: CAG
  source 1..20: mol_type = other DNA
ctctgcccacagcctggcac

SEQ ID NO: 8130 - DNA, 20 bp, synthetic construct
  misc_feature 1..20: note = Description of Artificial Sequence: Synthetic oligonucleotide
  misc_feature 1..20: note = Target: ANGPTL4; (-) strand; PAM type: NRG; PAM sequence: TGG
  source 1..20: mol_type = other DNA
gagcagctctgcccacagcc

SEQ ID NO: 8131 - DNA, 20 bp, synthetic construct
  misc_feature 1..20: note = Description of Artificial Sequence: Synthetic oligonucleotide
  misc_feature 1..20: note = Target: ANGPTL4; (-) strand; PAM type: NRG; PAM sequence: CAG
  source 1..20: mol_type = other DNA
acaaggagcagctctgccca

SEQ ID NO: 8132 - DNA, 20 bp, synthetic construct
  misc_feature 1..20: note = Description of Artificial Sequence: Synthetic oligonucleotide
  misc_feature 1..20: note = Target: ANGPTL4; (-) strand; PAM type: NRG; PAM sequence: CAG
  source 1..20: mol_type = other DNA
atgaggctggggacaaggag

SEQ ID NO: 8133 - DNA, 20 bp, synthetic construct
  misc_feature 1..20: note = Description of Artificial Sequence: Synthetic oligonucleotide
  misc_feature 1..20: note = Target: ANGPTL4; (-) strand; PAM type: NRG; PAM sequence: GAG
  source 1..20: mol_type = other DNA
tccatgaggctggggacaag

SEQ ID NO: 8134 - DNA, 20 bp, synthetic construct
  misc_feature 1..20: note = Description of Artificial Sequence: Synthetic oligonucleotide
  misc_feature 1..20: note = Target: ANGPTL4; (-) strand; PAM type: NRG; PAM sequence: AGG
  source 1..20: mol_type = other DNA
gctccatgaggctggggaca

SEQ ID NO: 8135 - DNA, 20 bp, synthetic construct
  misc_feature 1..20: note = Description of Artificial Sequence: Synthetic oligonucleotide
  misc_feature 1..20: note = Target: ANGPTL4; (-) strand; PAM type: NRG; PAM sequence: AAG
  source 1..20: mol_type = other DNA
ggctccatgaggctggggac

SEQ ID NO: 8136 - DNA, 20 bp, synthetic construct
  misc_feature 1..20: note = Description of Artificial Sequence: Synthetic oligonucleotide
  misc_feature 1..20: note = Target: ANGPTL4; (-) strand; PAM type: NRG; PAM sequence: GGG
  source 1..20: mol_type = other DNA
atggaggctccatgaggctg

SEQ ID NO: 8137 - DNA, 20 bp, synthetic construct
  misc_feature 1..20: note = Description of Artificial Sequence: Synthetic oligonucleotide
  misc_feature 1..20: note = Target: ANGPTL4; (-) strand; PAM type: NRG; PAM sequence: GGG
  source 1..20: mol_type = other DNA
aatggaggctccatgaggct

SEQ ID NO: 8138 - DNA, 20 bp, synthetic construct
  misc_feature 1..20: note = Description of Artificial Sequence: Synthetic oligonucleotide
  misc_feature 1..20: note = Target: ANGPTL4; (-) strand; PAM type: NRG; PAM sequence: TGG
  source 1..20: mol_type = other DNA
caatggaggctccatgaggc

SEQ ID NO: 8139 - DNA, 20 bp, synthetic construct
  misc_feature 1..20: note = Description of Artificial Sequence: Synthetic oligonucleotide
  misc_feature 1..20: note = Target: ANGPTL4; (-) strand; PAM type: NRG; PAM sequence: AGG
  source 1..20: mol_type = other DNA
gactcaatggaggctccatg

SEQ ID NO: 8140 - DNA, 20 bp, synthetic construct
  misc_feature 1..20: note = Description of Artificial Sequence: Synthetic oligonucleotide
  misc_feature 1..20: note = Target: ANGPTL4; (-) strand; PAM type: NRG; PAM sequence: GAG
  source 1..20: mol_type = other DNA
tgactcaatggaggctccat

SEQ ID NO: 8141 - DNA, 20 bp, synthetic construct
  misc_feature 1..20: note = Description of Artificial Sequence: Synthetic oligonucleotide
  misc_feature 1..20: note = Target: ANGPTL4; (-) strand; PAM type: NRG; PAM sequence: AGG
  source 1..20: mol_type = other DNA
tctctcctctgactcaatgg

SEQ ID NO: 8142 - DNA, 20 bp, synthetic construct
  misc_feature 1..20: note = Description of Artificial Sequence: Synthetic oligonucleotide
  misc_feature 1..20: note = Target: ANGPTL4; (-) strand; PAM type: NRG; PAM sequence: GAG
  source 1..20: mol_type = other DNA
gtctctcctctgactcaatg

SEQ ID NO: 8143 - DNA, 20 bp, synthetic construct
  misc_feature 1..20: note = Description of Artificial Sequence: Synthetic oligonucleotide
  misc_feature 1..20: note = Target: ANGPTL4; (-) strand; PAM type: NRG; PAM sequence: TGG
  source 1..20: mol_type = other DNA
tggtctctcctctgactcaa

SEQ ID NO: 8144 - DNA, 20 bp, synthetic construct
  misc_feature 1..20: note = Description of Artificial Sequence: Synthetic oligonucleotide
  misc_feature 1..20: note = Target: ANGPTL4; (-) strand; PAM type: NRG; PAM sequence: TGG
  source 1..20: mol_type = other DNA
tggacactgaggtcatctaa

SEQ ID NO: 8145 - DNA, 20 bp, synthetic construct
  misc_feature 1..20: note = Description of Artificial Sequence: Synthetic oligonucleotide
  misc_feature 1..20: note = Target: ANGPTL4; (-) strand; PAM type: NRG; PAM sequence: AGG
  source 1..20: mol_type = other DNA
cttcccactcctggacactg

SEQ ID NO: 8146 - DNA, 20 bp, synthetic construct
  misc_feature 1..20: note = Description of Artificial Sequence: Synthetic oligonucleotide
  misc_feature 1..20: note = Target: ANGPTL4; (-) strand; PAM type: NRG; PAM sequence: GAG
  source 1..20: mol_type = other DNA
acttcccactcctggacact

SEQ ID NO: 8147 - DNA, 20 bp, synthetic construct
  misc_feature 1..20: note = Description of Artificial Sequence: Synthetic oligonucleotide
  misc_feature 1..20: note = Target: ANGPTL4; (-) strand; PAM type: NRG; PAM sequence: TGG
  source 1..20: mol_type = other DNA
gagcaaggacttcccactcc

SEQ ID NO: 8148 - DNA, 20 bp, synthetic construct
  misc_feature 1..20: note = Description of Artificial Sequence: Synthetic oligonucleotide
  misc_feature 1..20: note = Target: ANGPTL4; (-) strand; PAM type: NRG; PAM sequence: AGG
  source 1..20: mol_type = other DNA
ccccaaatgggaattgagca

SEQ ID NO: 8149 - DNA, 20 bp, synthetic construct
  misc_feature 1..20: note = Description of Artificial Sequence: Synthetic oligonucleotide
  misc_feature 1..20: note = Target: ANGPTL4; (-) strand; PAM type: NRG; PAM sequence: AAG
  source 1..20: mol_type = other DNA
accccaaatgggaattgagc

SEQ ID NO: 8150 - DNA, 20 bp, synthetic construct
  misc_feature 1..20: note = Description of Artificial Sequence: Synthetic oligonucleotide
  misc_feature 1..20: note = Target: ANGPTL4; (-) strand; PAM type: NRG; PAM sequence: GAG
  source 1..20: mol_type = other DNA
gaacaccccaaatgggaatt

SEQ ID NO: 8151 - DNA, 20 bp, synthetic construct
  misc_feature 1..20: note = Description of Artificial Sequence: Synthetic oligonucleotide
  misc_feature 1..20: note = Target: ANGPTL4; (-) strand; PAM type: NRG; PAM sequence: GGG
  source 1..20: mol_type = other DNA
caggccagaacaccccaaat

SEQ ID NO: 8152 - DNA, 20 bp, synthetic construct
  misc_feature 1..20: note = Description of Artificial Sequence: Synthetic oligonucleotide
  misc_feature 1..20: note = Target: ANGPTL4; (-) strand; PAM type: NRG; PAM sequence: TGG
  source 1..20: mol_type = other DNA
ccaggccagaacaccccaaa

SEQ ID NO: 8153 - DNA, 20 bp, synthetic construct
  misc_feature 1..20: note = Description of Artificial Sequence: Synthetic oligonucleotide
  misc_feature 1..20: note = Target: ANGPTL4; (-) strand; PAM type: NRG; PAM sequence: CAG
  source 1..20: mol_type = other DNA
gcctcacccccagaccaggc

SEQ ID NO: 8154 - DNA, 20 bp, synthetic construct
  misc_feature 1..20: note = Description of Artificial Sequence: Synthetic oligonucleotide
  misc_feature 1..20: note = Target: ANGPTL4; (-) strand; PAM type: NRG; PAM sequence: AGG
  source 1..20: mol_type = other DNA
ccttgcctcacccccagacc

SEQ ID NO: 8155 - DNA, 20 bp, synthetic construct
  misc_feature 1..20: note = Description of Artificial Sequence: Synthetic oligonucleotide
  misc_feature 1..20: note = Target: ANGPTL4; (-) strand; PAM type: NRG; PAM sequence: CAG
  source 1..20: mol_type = other DNA
gccttgcctcacccccagac

SEQ ID NO: 8156 - DNA, 20 bp, synthetic construct
  misc_feature 1..20: note = Description of Artificial Sequence: Synthetic oligonucleotide
  misc_feature 1..20: note = Target: ANGPTL4; (-) strand; PAM type: NRG; PAM sequence: CAG
  source 1..20: mol_type = other DNA
accctgccttgcctcacccc

SEQ ID NO: 8157 - DNA, 20 bp, synthetic construct
  misc_feature 1..20: note = Description of Artificial Sequence: Synthetic oligonucleotide
  misc_feature 1..20: note = Target: ANGPTL4; (-) strand; PAM type: NRG; PAM sequence: AGG
  source 1..20: mol_type = other DNA
tctgggtcccagcttctgga

SEQ ID NO: 8158 - DNA, 20 bp, synthetic construct
  misc_feature 1..20: note = Description of Artificial Sequence: Synthetic oligonucleotide
  misc_feature 1..20: note = Target: ANGPTL4; (-) strand; PAM type: NRG; PAM sequence: AAG
  source 1..20: mol_type = other DNA
ctctgggtcccagcttctgg

SEQ ID NO: 8159 - DNA, 20 bp, synthetic construct
  misc_feature 1..20: note = Description of Artificial Sequence: Synthetic oligonucleotide
  misc_feature 1..20: note = Target: ANGPTL4; (-) strand; PAM type: NRG; PAM sequence: TGG
  source 1..20: mol_type = other DNA
tctctctgggtcccagcttc

SEQ ID NO: 8160 - DNA, 20 bp, synthetic construct
  misc_feature 1..20: note = Description of Artificial Sequence: Synthetic oligonucleotide
  misc_feature 1..20: note = Target: ANGPTL4; (-) strand; PAM type: NRG; PAM sequence: CAG
  source 1..20: mol_type = other DNA
tcacttctctctctgggtcc

SEQ ID NO: 8161 - DNA, 20 bp, synthetic construct
  misc_feature 1..20: note = Description of Artificial Sequence: Synthetic oligonucleotide
  misc_feature 1..20: note = Target: ANGPTL4; (-) strand; PAM type: NRG; PAM sequence: GGG
  source 1..20: mol_type = other DNA
ctttcctcacttctctctct

SEQ ID NO: 8162 - DNA, 20 bp, synthetic construct
  misc_feature 1..20: note = Description of Artificial Sequence: Synthetic oligonucleotide
  misc_feature 1..20: note = Target: ANGPTL4; (-) strand; PAM type: NRG; PAM sequence: TGG
  source 1..20: mol_type = other DNA
tctttcctcacttctctctc

SEQ ID NO: 8163 - DNA, 20 bp, synthetic construct
  misc_feature 1..20: note = Description of Artificial Sequence: Synthetic oligonucleotide
  misc_feature 1..20: note = Target: ANGPTL4; (-) strand; PAM type: NRG; PAM sequence: GGG
  source 1..20: mol_type = other DNA
tgtgaaccactgcgcccggc

SEQ ID NO: 8164 - DNA, 20 bp, synthetic construct
  misc_feature 1..20: note = Description of Artificial Sequence: Synthetic oligonucleotide
  misc_feature 1..20: note = Target: ANGPTL4; (-) strand; PAM type: NRG; PAM sequence: CGG
  source 1..20: mol_type = other DNA
gtgtgaaccactgcgcccgg

SEQ ID NO: 8165 - DNA, 20 bp, synthetic construct
  misc_feature 1..20: note = Description of Artificial Sequence: Synthetic oligonucleotide
  misc_feature 1..20: note = Target: ANGPTL4; (-) strand; PAM type: NRG; PAM sequence: CGG
  source 1..20: mol_type = other DNA
caggtgtgaaccactgcgcc

SEQ ID NO: 8166 - DNA, 20 bp, synthetic construct
  misc_feature 1..20: note = Description of Artificial Sequence: Synthetic oligonucleotide
  misc_feature 1..20: note = Target: ANGPTL4; (-) strand; PAM type: NRG; PAM sequence: AGG
  source 1..20: mol_type = other DNA
tcccaaagtgctgggattac

SEQ ID NO: 8167 - DNA, 20 bp, synthetic construct
  misc_feature 1..20: note = Description of Artificial Sequence: Synthetic oligonucleotide
  misc_feature 1..20: note = Target: ANGPTL4; (-) strand; PAM type: NRG; PAM sequence: CAG
  source 1..20: mol_type = other DNA
ctcccaaagtgctgggatta

SEQ ID NO: 8168 - DNA, 20 bp, synthetic construct
  misc_feature 1..20: note = Description of Artificial Sequence: Synthetic oligonucleotide
  misc_feature 1..20: note = Target: ANGPTL4; (-) strand; PAM type: NRG; PAM sequence: GGG
  source 1..20: mol_type = other DNA
ccttggcctcccaaagtgct

SEQ ID NO: 8169 - DNA, 20 bp, synthetic construct
  misc_feature 1..20: note = Description of Artificial Sequence: Synthetic oligonucleotide
  misc_feature 1..20: note = Target: ANGPTL4; (-) strand; PAM type: NRG; PAM sequence: TGG
  source 1..20: mol_type = other DNA
gccttggcctcccaaagtgc

SEQ ID NO: 8170 - DNA, 20 bp, synthetic construct
  misc_feature 1..20: note = Description of Artificial Sequence: Synthetic oligonucleotide
  misc_feature 1..20: note = Target: ANGPTL4; (-) strand; PAM type: NRG; PAM sequence: AAG
  source 1..20: mol_type = other DNA
ccgccagccttggcctccca

SEQ ID NO: 8171 - DNA, 20 bp, synthetic construct
  misc_feature 1..20: note = Description of Artificial Sequence: Synthetic oligonucleotide
  misc_feature 1..20: note = Target: ANGPTL4; (-) strand; PAM type: NRG; PAM sequence: TGG
  source 1..20: mol_type = other DNA
acctcgtgatccgccagcct

SEQ ID NO: 8172 - DNA, 20 bp, synthetic construct
  misc_feature 1..20: note = Description of Artificial Sequence: Synthetic oligonucleotide
  misc_feature 1..20: note = Target: ANGPTL4; (-) strand; PAM type: NRG; PAM sequence: CAG
  source 1..20: mol_type = other DNA
ctcctgacctcgtgatccgc

SEQ ID NO: 8173 - DNA, 20 bp, synthetic construct
  misc_feature 1..20: note = Description of Artificial Sequence: Synthetic oligonucleotide
  misc_feature 1..20: note = Target: ANGPTL4; (-) strand; PAM type: NRG; PAM sequence: TGG
  source 1..20: mol_type = other DNA
tttcaccatgttggccagac

SEQ ID NO: 8174 - DNA, 20 bp, synthetic construct
  misc_feature 1..20: note = Description of Artificial Sequence: Synthetic oligonucleotide
  misc_feature 1..20: note = Target: ANGPTL4; (-) strand; PAM type: NRG; PAM sequence: CAG
  source 1..20: mol_type = other DNA
gggggtttcaccatgttggc

SEQ ID NO: 8175 - DNA, 20 bp, synthetic construct
  misc_feature 1..20: note = Description of Artificial Sequence: Synthetic oligonucleotide
  misc_feature 1..20: note = Target: ANGPTL4; (-) strand; PAM type: NRG; PAM sequence: TGG
  source 1..20: mol_type = other DNA
agacgggggtttcaccatgt

SEQ ID NO: 8176 - DNA, 20 bp, synthetic construct
  misc_feature 1..20: note = Description of Artificial Sequence: Synthetic oligonucleotide
  misc_feature 1..20: note = Target: ANGPTL4; (-) strand; PAM type: NRG; PAM sequence: GGG
  source 1..20: mol_type = other DNA
tgcattatttgtagagacgg

SEQ ID NO: 8177 - DNA, 20 bp, synthetic construct
  misc_feature 1..20: note = Description of Artificial Sequence: Synthetic oligonucleotide
  misc_feature 1..20: note = Target: ANGPTL4; (-) strand; PAM type: NRG; PAM sequence: GGG
  source 1..20: mol_type = other DNA
ttgcattatttgtagagacg

SEQ ID NO: 8178 - DNA, 20 bp, synthetic construct
  misc_feature 1..20: note = Description of Artificial Sequence: Synthetic oligonucleotide
  misc_feature 1..20: note = Target: ANGPTL4; (-) strand; PAM type: NRG; PAM sequence: GGG
  source 1..20: mol_type = other DNA
tttgcattatttgtagagac

SEQ ID NO: 8179 - DNA, 20 bp, synthetic construct
  misc_feature 1..20: note = Description of Artificial Sequence: Synthetic oligonucleotide
  misc_feature 1..20: note = Target: ANGPTL4; (-) strand; PAM type: NRG; PAM sequence: CGG
  source 1..20: mol_type = other DNA
ttttgcattatttgtagaga

SEQ ID NO: 8180 - DNA, 20 bp, synthetic construct
  misc_feature 1..20: note = Description of Artificial Sequence: Synthetic oligonucleotide
  misc_feature 1..20: note = Target: ANGPTL4; (-) strand; PAM type: NRG; PAM sequence: GAG
  source 1..20: mol_type = other DNA
tagtttttgcattatttgta

SEQ ID NO: 8181 - DNA, 20 bp, synthetic construct
  misc_feature 1..20: note = Description of Artificial Sequence: Synthetic oligonucleotide
  misc_feature 1..20: note = Target: ANGPTL4; (-) strand; PAM type: NRG; PAM sequence: TAG
  source 1..20: mol_type = other DNA
actagtttttgcattatttg

SEQ ID NO: 8182 - DNA, 20 bp, synthetic construct
  misc_feature 1..20: note = Description of Artificial Sequence: Synthetic oligonucleotide
  misc_feature 1..20: note = Target: ANGPTL4; (-) strand; PAM type: NRG; PAM sequence: TAG
  source 1..20: mol_type = other DNA
catgtgccaccacgcccgac

SEQ ID NO: 8183 - DNA, 20 bp, synthetic construct
  misc_feature 1..20: note = Description of Artificial Sequence: Synthetic oligonucleotide
  misc_feature 1..20: note = Target: ANGPTL4; (-) strand; PAM type: NRG; PAM sequence: AGG
  source 1..20: mol_type = other DNA
tccggagcagctgggactac

SEQ ID NO: 8184 - DNA, 20 bp, synthetic construct
  misc_feature 1..20: note = Description of Artificial Sequence: Synthetic oligonucleotide
  misc_feature 1..20: note = Target: ANGPTL4; (-) strand; PAM type: NRG; PAM sequence: CAG
  source 1..20: mol_type = other DNA
ctccggagcagctgggacta

SEQ ID NO: 8185 - DNA, 20 bp, synthetic construct
  misc_feature 1..20: note = Description of Artificial Sequence: Synthetic oligonucleotide
  misc_feature 1..20: note = Target: ANGPTL4; (-) strand; PAM type: NRG; PAM sequence: GGG
  source 1..20: mol_type = other DNA
ccgcagcctccggagcagct

SEQ ID NO: 8186 - DNA, 20 bp, synthetic construct
  misc_feature 1..20: note = Description of Artificial Sequence: Synthetic oligonucleotide
  misc_feature 1..20: note = Target: ANGPTL4; (-) strand; PAM type: NRG; PAM sequence: TGG
  source 1..20: mol_type = other DNA
gccgcagcctccggagcagc

SEQ ID NO: 8187 - DNA, 20 bp, synthetic construct
  misc_feature 1..20: note = Description of Artificial Sequence: Synthetic oligonucleotide
  misc_feature 1..20: note = Target: ANGPTL4; (-) strand; PAM type: NRG; PAM sequence: CAG
  source 1..20: mol_type = other DNA
ttctgccgcagcctccggag

SEQ ID NO: 8188 - DNA, 20 bp, synthetic construct
  misc_feature 1..20: note = Description of Artificial Sequence: Synthetic oligonucleotide
  misc_feature 1..20: note = Target: ANGPTL4; (-) strand; PAM type: NRG; PAM sequence: GAG
  source 1..20: mol_type = other DNA
caattctgccgcagcctccg

SEQ ID NO: 8189 - DNA, 20 bp, synthetic construct
  misc_feature 1..20: note = Description of Artificial Sequence: Synthetic oligonucleotide
  misc_feature 1..20: note = Target: ANGPTL4; (-) strand; PAM type: NRG; PAM sequence: CGG
  source 1..20: mol_type = other DNA
agcaattctgccgcagcctc

SEQ ID NO: 8190 - DNA, 20 bp, synthetic construct
  misc_feature 1..20: note = Description of Artificial Sequence: Synthetic oligonucleotide
  misc_feature 1..20: note = Target: ANGPTL4; (-) strand; PAM type: NRG; PAM sequence: CAG
  source 1..20: mol_type = other DNA
aggttcaagcaattctgccg

SEQ ID NO: 8191 - DNA, 20 bp, synthetic construct
  misc_feature 1..20: note = Description of Artificial Sequence: Synthetic oligonucleotide
  misc_feature 1..20: note = Target: ANGPTL4; (-) strand; PAM type: NRG; PAM sequence: AAG
  source 1..20: mol_type = other DNA
aacctccgcctcccaggttc

SEQ ID NO: 8192 - DNA, 20 bp, synthetic construct
  misc_feature 1..20: note = Description of Artificial Sequence: Synthetic oligonucleotide
  misc_feature 1..20: note = Target: ANGPTL4; (-) strand; PAM type: NRG; PAM sequence: AGG
  source 1..20: mol_type = other DNA
cactgcaacctccgcctccc

SEQ ID NO: 8193 - DNA, 20 bp, synthetic construct
  misc_feature 1..20: note = Description of Artificial Sequence: Synthetic oligonucleotide
  misc_feature 1..20: note = Target: ANGPTL4; (-) strand; PAM type: NRG; PAM sequence: CAG
  source 1..20: mol_type = other DNA
tcactgcaacctccgcctcc

SEQ ID NO: 8194 - DNA, 20 bp, synthetic construct
  misc_feature 1..20: note = Description of Artificial Sequence: Synthetic oligonucleotide
  misc_feature 1..20: note = Target: ANGPTL4; (-) strand; PAM type: NRG; PAM sequence: TGG
  source 1..20: mol_type = other DNA
ggagtgcagtggcgcaatct

SEQ ID NO: 8195 - DNA, 20 bp, synthetic construct
  misc_feature 1..20: note = Description of Artificial Sequence: Synthetic oligonucleotide
  misc_feature 1..20: note = Target: ANGPTL4; (-) strand; PAM type: NRG; PAM sequence: TGG
  source 1..20: mol_type = other DNA
gtcgccaggctggagtgcag

SEQ ID NO: 8196 - DNA, 20 bp, synthetic construct
  misc_feature 1..20: note = Description of Artificial Sequence: Synthetic oligonucleotide
  misc_feature 1..20: note = Target: ANGPTL4; (-) strand; PAM type: NRG; PAM sequence: CAG
  source 1..20: mol_type = other DNA
tctgtcgccaggctggagtg

SEQ ID NO: 8197 - DNA, 20 bp, synthetic construct
  misc_feature 1..20: note = Description of Artificial Sequence: Synthetic oligonucleotide
  misc_feature 1..20: note = Target: ANGPTL4; (-) strand; PAM type: NRG; PAM sequence: GAG
  source 1..20: mol_type = other DNA
ctcgctctgtcgccaggctg

SEQ ID NO: 8198 - DNA, 20 bp, synthetic construct
  misc_feature 1..20: note = Description of Artificial Sequence: Synthetic oligonucleotide
  misc_feature 1..20: note = Target: ANGPTL4; (-) strand; PAM type: NRG; PAM sequence: TGG
  source 1..20: mol_type = other DNA
gtctcgctctgtcgccaggc

SEQ ID NO: 8199 - DNA, 20 bp, synthetic construct
  misc_feature 1..20: note = Description of Artificial Sequence: Synthetic oligonucleotide
  misc_feature 1..20: note = Target: ANGPTL4; (-) strand; PAM type: NRG; PAM sequence: AGG
  source 1..20: mol_type = other DNA
cggagtctcgctctgtcgcc

SEQ ID NO: 8200 - DNA, 20 bp, synthetic construct
  misc_feature 1..20: note = Description of Artificial Sequence: Synthetic oligonucleotide
  misc_feature 1..20: note = Target: ANGPTL4; (-) strand; PAM type: NRG; PAM sequence: CAG
  source 1..20: mol_type = other DNA
acggagtctcgctctgtcgc

SEQ ID NO: 8201 - DNA, 20 bp, synthetic construct
  misc_feature 1..20: note = Description of Artificial Sequence: Synthetic oligonucleotide
  misc_feature 1..20: note = Target: ANGPTL4; (-) strand; PAM type: NRG; PAM sequence: GAG
  source 1..20: mol_type = other DNA
ttgttttgttttttgatacg

SEQ ID NO: 8202 - DNA, 20 bp, synthetic construct
  misc_feature 1..20: note = Description of Artificial Sequence: Synthetic oligonucleotide
  misc_feature 1..20: note = Target: ANGPTL4; (-) strand; PAM type: NRG; PAM sequence: CGG
  source 1..20: mol_type = other DNA
ttttgttttgttttttgata

SEQ ID NO: 8203 - DNA, 20 bp, synthetic construct
  misc_feature 1..20: note = Description of Artificial Sequence: Synthetic oligonucleotide
  misc_feature 1..20: note = Target: ANGPTL4; (-) strand; PAM type: NRG; PAM sequence: GGG
  source 1..20: mol_type = other DNA
acatgctgttccccctgcct

SEQ ID NO: 8204 - DNA, 20 bp, synthetic construct
  misc_feature 1..20: note = Description of Artificial Sequence: Synthetic oligonucleotide
  misc_feature 1..20: note = Target: ANGPTL4; (-) strand; PAM type: NRG; PAM sequence: TGG
  source 1..20: mol_type = other DNA
cacatgctgttccccctgcc

SEQ ID NO: 8205 - DNA, 20 bp, synthetic construct
  misc_feature 1..20: note = Description of Artificial Sequence: Synthetic oligonucleotide
  misc_feature 1..20: note = Target: ANGPTL4; (-) strand; PAM type: NRG; PAM sequence: GGG
  source 1..20: mol_type = other DNA
ccacacaccgtcctgccaca

SEQ ID NO: 8206 - DNA, 20 bp, synthetic construct
  misc_feature 1..20: note = Description of Artificial Sequence: Synthetic oligonucleotide
  misc_feature 1..20: note = Target: ANGPTL4; (-) strand; PAM type: NRG; PAM sequence: AGG
  source 1..20: mol_type = other DNA
accacacaccgtcctgccac

SEQ ID NO: 8207 - DNA, 20 bp, synthetic construct
  misc_feature 1..20: note = Description of Artificial Sequence: Synthetic oligonucleotide
  misc_feature 1..20: note = Target: ANGPTL4; (-) strand; PAM type: NRG; PAM sequence: CAG
  source 1..20: mol_type = other DNA
taccacacaccgtcctgcca

SEQ ID NO: 8208 - DNA, 20 bp, synthetic construct
  misc_feature 1..20: note = Description of Artificial Sequence: Synthetic oligonucleotide
  misc_feature 1..20: note = Target: ANGPTL4; (-) strand; PAM type: NRG; PAM sequence: AGG
  source 1..20: mol_type = other DNA
ccacaccctctctggcacac

SEQ ID NO: 8209 - DNA, 20 bp, synthetic construct
  misc_feature 1..20: note = Description of Artificial Sequence: Synthetic oligonucleotide
  misc_feature 1..20: note = Target: ANGPTL4; (-) strand; PAM type: NRG; PAM sequence: CAG
  source 1..20: mol_type = other DNA
cccacaccctctctggcaca

SEQ ID NO: 8210 - DNA, 20 bp, synthetic construct
  misc_feature 1..20: note = Description of Artificial Sequence: Synthetic oligonucleotide
  misc_feature 1..20: note = Target: ANGPTL4; (-) strand; PAM type: NRG; PAM sequence: TGG
  source 1..20: mol_type = other DNA
tgctgtacccacaccctctc

SEQ ID NO: 8211 - DNA, 20 bp, synthetic construct
  misc_feature 1..20: note = Description of Artificial Sequence: Synthetic oligonucleotide
  misc_feature 1..20: note = Target: ANGPTL4; (-) strand; PAM type: NRG; PAM sequence: CAG
  source 1..20: mol_type = other DNA
ccacaaggcacctggaggac

SEQ ID NO: 8212 - DNA, 20 bp, synthetic construct
  misc_feature 1..20: note = Description of Artificial Sequence: Synthetic oligonucleotide
  misc_feature 1..20: note = Target: ANGPTL4; (-) strand; PAM type: NRG; PAM sequence: AGG
  source 1..20: mol_type = other DNA
atggtccacaaggcacctgg

SEQ ID NO: 8213 - DNA, 20 bp, synthetic construct
  misc_feature 1..20: note = Description of Artificial Sequence: Synthetic oligonucleotide
  misc_feature 1..20: note = Target: ANGPTL4; (-) strand; PAM type: NRG; PAM sequence: GAG
  source 1..20: mol_type = other DNA
catggtccacaaggcacctg

SEQ ID NO: 8214 - DNA, 20 bp, synthetic construct
  misc_feature 1..20: note = Description of Artificial Sequence: Synthetic oligonucleotide
  misc_feature 1..20: note = Target: ANGPTL4; (-) strand; PAM type: NRG; PAM sequence: TGG
  source 1..20: mol_type = other DNA
agcatggtccacaaggcacc

SEQ ID NO: 8215 - DNA, 20 bp, synthetic construct
  misc_feature 1..20: note = Description of Artificial Sequence: Synthetic oligonucleotide
  misc_feature 1..20: note = Target: ANGPTL4; (-) strand; PAM type: NRG; PAM sequence: AGG
  source 1..20: mol_type = other DNA
cttcctcagcatggtccaca

SEQ ID NO: 8216 - DNA, 20 bp, synthetic construct
  misc_feature 1..20: note = Description of Artificial Sequence: Synthetic oligonucleotide
  misc_feature 1..20: note = Target: ANGPTL4; (-) strand; PAM type: NRG; PAM sequence: AAG
  source 1..20: mol_type = other DNA
ccttcctcagcatggtccac

SEQ ID NO: 8217 - DNA, 20 bp, synthetic construct
  misc_feature 1..20: note = Description of Artificial Sequence: Synthetic oligonucleotide
  misc_feature 1..20: note = Target: ANGPTL4; (-) strand; PAM type: NRG; PAM sequence: TGG
  source 1..20: mol_type = other DNA
ccctatgtccttcctcagca

SEQ ID NO: 8218 - DNA, 20 bp, synthetic construct
  misc_feature 1..20: note = Description of Artificial Sequence: Synthetic oligonucleotide
  misc_feature 1..20: note = Target: ANGPTL4; (-) strand; PAM type: NRG; PAM sequence: CAG
  source 1..20: mol_type = other DNA
tggctccctatgtccttcct

SEQ ID NO: 8219 - DNA, 20 bp, synthetic construct
  misc_feature 1..20: note = Description of Artificial Sequence: Synthetic oligonucleotide
  misc_feature 1..20: note = Target: ANGPTL4; (-) strand; PAM type: NRG; PAM sequence: TGG
  source 1..20: mol_type = other DNA
catctgcctaacctcttcca

SEQ ID NO: 8220 - DNA, 20 bp, synthetic construct
  misc_feature 1..20: note = Description of Artificial Sequence: Synthetic oligonucleotide
  misc_feature 1..20: note = Target: ANGPTL4; (-) strand; PAM type: NRG; PAM sequence: AGG
  source 1..20: mol_type = other DNA
tggatgaccagggaagtaaa

SEQ ID NO: 8221 - DNA, 20 bp, synthetic construct
  misc_feature 1..20: note = Description of Artificial Sequence: Synthetic oligonucleotide
  misc_feature 1..20: note = Target: ANGPTL4; (-) strand; PAM type: NRG; PAM sequence: AAG
  source 1..20: mol_type = other DNA
gtggatgaccagggaagtaa

SEQ ID NO: 8222 - DNA, 20 bp, synthetic construct
  misc_feature 1..20: note = Description of Artificial Sequence: Synthetic oligonucleotide
  misc_feature 1..20: note = Target: ANGPTL4; (-) strand; PAM type: NRG; PAM sequence: AAG
  source 1..20: mol_type = other DNA
ttaacagtggatgaccaggg

SEQ ID NO: 8223 - DNA, 20 bp, synthetic construct
  misc_feature 1..20: note = Description of Artificial Sequence: Synthetic oligonucleotide
  misc_feature 1..20: note = Target: ANGPTL4; (-) strand; PAM type: NRG; PAM sequence: GGG
  source 1..20: mol_type = other DNA
ggcttaacagtggatgacca

SEQ ID NO: 8224 - DNA, 20 bp, synthetic construct
  misc_feature 1..20: note = Description of Artificial Sequence: Synthetic oligonucleotide
  misc_feature 1..20: note = Target: ANGPTL4; (-) strand; PAM type: NRG; PAM sequence: AGG
  source 1..20: mol_type = other DNA
gggcttaacagtggatgacc

SEQ ID NO: 8225 - DNA, 20 bp, synthetic construct
  misc_feature 1..20: note = Description of Artificial Sequence: Synthetic oligonucleotide
  misc_feature 1..20: note = Target: ANGPTL4; (-) strand; PAM type: NRG; PAM sequence: CAG
  source 1..20: mol_type = other DNA
ggggcttaacagtggatgac

SEQ ID NO: 8226 - DNA, 20 bp, synthetic construct
  misc_feature 1..20: note = Description of Artificial Sequence: Synthetic oligonucleotide
  misc_feature 1..20: note = Target: ANGPTL4; (-) strand; PAM type: NRG; PAM sequence: TGG
  source 1..20: mol_type = other DNA
catatctgggggcttaacag

SEQ ID NO: 8227 - DNA, 20 bp, synthetic construct
  misc_feature 1..20: note = Description of Artificial Sequence: Synthetic oligonucleotide
  misc_feature 1..20: note = Target: ANGPTL4; (-) strand; PAM type: NRG; PAM sequence: CAG
  source 1..20: mol_type = other DNA
aggcatatctgggggcttaa

SEQ ID NO: 8228 - DNA, 20 bp, synthetic construct
  misc_feature 1..20: note = Description of Artificial Sequence: Synthetic oligonucleotide
  misc_feature 1..20: note = Target: ANGPTL4; (-) strand; PAM type: NRG; PAM sequence: GGG
  source 1..20: mol_type = other DNA
caggagccaggcatatctgg

SEQ ID NO: 8229 - DNA, 20 bp, synthetic construct
  misc_feature 1..20: note = Description of Artificial Sequence: Synthetic oligonucleotide
  misc_feature 1..20: note = Target: ANGPTL4; (-) strand; PAM type: NRG; PAM sequence: GGG
  source 1..20: mol_type = other DNA
tcaggagccaggcatatctg

SEQ ID NO: 8230 - DNA, 20 bp, synthetic construct
  misc_feature 1..20: note = Description of Artificial Sequence: Synthetic oligonucleotide
  misc_feature 1..20: note = Target: ANGPTL4; (-) strand; PAM type: NRG; PAM sequence: GGG
  source 1..20: mol_type = other DNA
ctcaggagccaggcatatct

SEQ ID NO: 8231 - DNA, 20 bp, synthetic construct
  misc_feature 1..20: note = Description of Artificial Sequence: Synthetic oligonucleotide
  misc_feature 1..20: note = Target: ANGPTL4; (-) strand; PAM type: NRG; PAM sequence: TGG
  source 1..20: mol_type = other DNA
tctcaggagccaggcatatc

SEQ ID NO: 8232 - DNA, 20 bp, synthetic construct
  misc_feature 1..20: note = Description of Artificial Sequence: Synthetic oligonucleotide
  misc_feature 1..20: note = Target: ANGPTL4; (-) strand; PAM type: NRG; PAM sequence: AGG
  source 1..20: mol_type = other DNA
tggggggggtctcaggagcc

SEQ ID NO: 8233 - DNA, 20 bp, synthetic construct
  misc_feature 1..20: note = Description of Artificial Sequence: Synthetic oligonucleotide
  misc_feature 1..20: note = Target: ANGPTL4; (-) strand; PAM type: NRG; PAM sequence: CAG
  source 1..20: mol_type = other DNA
ctggggggggtctcaggagc

SEQ ID NO: 8234 - DNA, 20 bp, synthetic construct
  misc_feature 1..20: note = Description of Artificial Sequence: Synthetic oligonucleotide
  misc_feature 1..20: note = Target: ANGPTL4; (-) strand; PAM type: NRG; PAM sequence: GAG
  source 1..20: mol_type = other DNA
gcccctggggggggtctcag

SEQ ID NO: 8235 - DNA, 20 bp, synthetic construct
  misc_feature 1..20: note = Description of Artificial Sequence: Synthetic oligonucleotide
  misc_feature 1..20: note = Target: ANGPTL4; (-) strand; PAM type: NRG; PAM sequence: AGG
  source 1..20: mol_type = other DNA
cagcccctggggggggtctc

SEQ ID NO: 8236 - DNA, 20 bp, synthetic construct
  misc_feature 1..20: note = Description of Artificial Sequence: Synthetic oligonucleotide
  misc_feature 1..20: note = Target: ANGPTL4; (-) strand; PAM type: NRG; PAM sequence: CAG
  source 1..20: mol_type = other DNA
gcagcccctggggggggtct

SEQ ID NO: 8237 - DNA, 20 bp, synthetic construct
  misc_feature 1..20: note = Description of Artificial Sequence: Synthetic oligonucleotide
  misc_feature 1..20: note = Target: ANGPTL4; (-) strand; PAM type: NRG; PAM sequence: GGG
  source 1..20: mol_type = other DNA
aggagggcagcccctggggg

SEQ ID NO: 8238 - DNA, 20 bp, synthetic construct
  misc_feature 1..20: note = Description of Artificial Sequence: Synthetic oligonucleotide
  misc_feature 1..20: note = Target: ANGPTL4; (-) strand; PAM type: NRG; PAM sequence: GGG
  source 1..20: mol_type = other DNA
caggagggcagcccctgggg

SEQ ID NO: 8239 - DNA, 20 bp, synthetic construct
  misc_feature 1..20: note = Description of Artificial Sequence: Synthetic oligonucleotide
  misc_feature 1..20: note = Target: ANGPTL4; (-) strand; PAM type: NRG; PAM sequence: GGG
  source 1..20: mol_type = other DNA
acaggagggcagcccctggg

SEQ ID NO: 8240 - DNA, 20 bp, synthetic construct
  misc_feature 1..20: note = Description of Artificial Sequence: Synthetic oligonucleotide
  misc_feature 1..20: note = Target: ANGPTL4; (-) strand; PAM type: NRG; PAM sequence: GGG
  source 1..20: mol_type = other DNA
aacaggagggcagcccctgg

SEQ ID NO: 8241 - DNA, 20 bp, synthetic construct
  misc_feature 1..20: note = Description of Artificial Sequence: Synthetic oligonucleotide
  misc_feature 1..20: note = Target: ANGPTL4; (-) strand; PAM type: NRG; PAM sequence: GGG
  source 1..20: mol_type = other DNA
aaacaggagggcagcccctg

SEQ ID NO: 8242 - DNA, 20 bp, synthetic construct
  misc_feature 1..20: note = Description of Artificial Sequence: Synthetic oligonucleotide
  misc_feature 1..20: note = Target: ANGPTL4; (-) strand; PAM type: NRG; PAM sequence: GGG
  source 1..20: mol_type = other DNA
gaaacaggagggcagcccct

SEQ ID NO: 8243 - DNA, 20 bp, synthetic construct
  misc_feature 1..20: note = Description of Artificial Sequence: Synthetic oligonucleotide
  misc_feature 1..20: note = Target: ANGPTL4; (-) strand; PAM type: NRG; PAM sequence: TGG
  source 1..20: mol_type = other DNA
tgaaacaggagggcagcccc

SEQ ID NO: 8244 - DNA, 20 bp, synthetic construct
  misc_feature 1..20: note = Description of Artificial Sequence: Synthetic oligonucleotide
  misc_feature 1..20: note = Target: ANGPTL4; (-) strand; PAM type: NRG; PAM sequence: CAG
  source 1..20: mol_type = other DNA
ggagacttgaaacaggaggg

SEQ ID NO: 8245 - DNA, 20 bp, synthetic construct
  misc_feature 1..20: note = Description of Artificial Sequence: Synthetic oligonucleotide
  misc_feature 1..20: note = Target: ANGPTL4; (-) strand; PAM type: NRG; PAM sequence: GGG
  source 1..20: mol_type = other DNA
agtggagacttgaaacagga

SEQ ID NO: 8246 - DNA, 20 bp, synthetic construct
  misc_feature 1..20: note = Description of Artificial Sequence: Synthetic oligonucleotide
  misc_feature 1..20: note = Target: ANGPTL4; (-) strand; PAM type: NRG; PAM sequence: AGG
  source 1..20: mol_type = other DNA
aagtggagacttgaaacagg

SEQ ID NO: 8247 - DNA, 20 bp, synthetic construct
  misc_feature 1..20: note = Description of Artificial Sequence: Synthetic oligonucleotide
  misc_feature 1..20: note = Target: ANGPTL4; (-) strand; PAM type: NRG; PAM sequence: GAG
  source 1..20: mol_type = other DNA
aaagtggagacttgaaacag

SEQ ID NO: 8248 - DNA, 20 bp, synthetic construct
  misc_feature 1..20: note = Description of Artificial Sequence: Synthetic oligonucleotide
  misc_feature 1..20: note = Target: ANGPTL4; (-) strand; PAM type: NRG; PAM sequence: AGG
  source 1..20: mol_type = other DNA
ataaagtggagacttgaaac

SEQ ID NO: 8249 - DNA, 20 bp, synthetic construct
  misc_feature 1..20: note = Description of Artificial Sequence: Synthetic oligonucleotide
  misc_feature 1..20: note = Target: ANGPTL4; (-) strand; PAM type: NRG; PAM sequence: CAG
  source 1..20: mol_type = other DNA
gataaagtggagacttgaaa

SEQ ID NO: 8250 - DNA, 20 bp, synthetic construct
  misc_feature 1..20: note = Description of Artificial Sequence: Synthetic oligonucleotide
  misc_feature 1..20: note = Target: ANGPTL4; (-) strand; PAM type: NRG; PAM sequence: GAG
  source 1..20: mol_type = other DNA
ccctgaagggagataaagtg

SEQ ID NO: 8251 - DNA, 20 bp, synthetic construct
  misc_feature 1..20: note = Description of Artificial Sequence: Synthetic oligonucleotide
  misc_feature 1..20: note = Target: ANGPTL4; (-) strand; PAM type: NRG; PAM sequence: TGG
  source 1..20: mol_type = other DNA
agccctgaagggagataaag

SEQ ID NO: 8252 - DNA, 20 bp, synthetic construct
  misc_feature 1..20: note = Description of Artificial Sequence: Synthetic oligonucleotide
  misc_feature 1..20: note = Target: ANGPTL4; (-) strand; PAM type: NRG; PAM sequence: AAG
  source 1..20: mol_type = other DNA
ggcagccctgaagggagata

SEQ ID NO: 8253 - DNA, 20 bp, synthetic construct
  misc_feature 1..20: note = Description of Artificial Sequence: Synthetic oligonucleotide
  misc_feature 1..20: note = Target: ANGPTL4; (-) strand; PAM type: NRG; PAM sequence: GAG
  source 1..20: mol_type = other DNA
tccctgggcagccctgaagg

SEQ ID NO: 8254 - DNA, 20 bp, synthetic construct
  misc_feature 1..20: note = Description of Artificial Sequence: Synthetic oligonucleotide
  misc_feature 1..20: note = Target: ANGPTL4; (-) strand; PAM type: NRG; PAM sequence: GGG
  source 1..20: mol_type = other DNA
aatccctgggcagccctgaa

SEQ ID NO: 8255 - DNA, 20 bp, synthetic construct
  misc_feature 1..20: note = Description of Artificial Sequence: Synthetic oligonucleotide
  misc_feature 1..20: note = Target: ANGPTL4; (-) strand; PAM type: NRG; PAM sequence: AGG
  source 1..20: mol_type = other DNA
caatccctgggcagccctga

SEQ ID NO: 8256 - DNA, 20 bp, synthetic construct
  misc_feature 1..20: note = Description of Artificial Sequence: Synthetic oligonucleotide
  misc_feature 1..20: note = Target: ANGPTL4; (-) strand; PAM type: NRG; PAM sequence: AAG
  source 1..20: mol_type = other DNA
gcaatccctgggcagccctg

SEQ ID NO: 8257 - DNA, 20 bp, synthetic construct
  misc_feature 1..20: note = Description of Artificial Sequence: Synthetic oligonucleotide
  misc_feature 1..20: note = Target: ANGPTL4; (-) strand; PAM type: NRG; PAM sequence: CAG
  source 1..20: mol_type = other DNA
agctcctggcaatccctggg

SEQ ID NO: 8258 - DNA, 20 bp, synthetic construct
  misc_feature 1..20: note = Description of Artificial Sequence: Synthetic oligonucleotide
  misc_feature 1..20: note = Target: ANGPTL4; (-) strand; PAM type: NRG; PAM sequence: GGG
  source 1..20: mol_type = other DNA
aacagctcctggcaatccct

SEQ ID NO: 8259 - DNA, 20 bp, synthetic construct
  misc_feature 1..20: note = Description of Artificial Sequence: Synthetic oligonucleotide
  misc_feature 1..20: note = Target: ANGPTL4; (-) strand; PAM type: NRG; PAM sequence: TGG
  source 1..20: mol_type = other DNA
gaacagctcctggcaatccc

SEQ ID NO: 8260 - DNA, 20 bp, synthetic construct
  misc_feature 1..20: note = Description of Artificial Sequence: Synthetic oligonucleotide
  misc_feature 1..20: note = Target: ANGPTL4; (-) strand; PAM type: NRG; PAM sequence: TGG
  source 1..20: mol_type = other DNA
ccccaacctggaacagctcc

SEQ ID NO: 8261 - DNA, 20 bp, synthetic construct
  misc_feature 1..20: note = Description of Artificial Sequence: Synthetic oligonucleotide
  misc_feature 1..20: note = Target: ANGPTL4; (-) strand; PAM type: NRG; PAM sequence: CAG
  source 1..20: mol_type = other DNA
tgcctctccccaacctggaa

SEQ ID NO: 8262 - DNA, 20 bp, synthetic construct
  misc_feature 1..20: note = Description of Artificial Sequence: Synthetic oligonucleotide
  misc_feature 1..20: note = Target: ANGPTL4; (-) strand; PAM type: NRG; PAM sequence: TGG
  source 1..20: mol_type = other DNA
cactctgcctctccccaacc

SEQ ID NO: 8263 - DNA, 20 bp, synthetic construct
  misc_feature 1..20: note = Description of Artificial Sequence: Synthetic oligonucleotide
  misc_feature 1..20: note = Target: ANGPTL4; (-) strand; PAM type: NRG; PAM sequence: TAG
  source 1..20: mol_type = other DNA
ccctgaggctggatttcaaa

SEQ ID NO: 8264 - DNA, 20 bp, synthetic construct
  misc_feature 1..20: note = Description of Artificial Sequence: Synthetic oligonucleotide
  misc_feature 1..20: note = Target: ANGPTL4; (-) strand; PAM type: NRG; PAM sequence: TGG
  source 1..20: mol_type = other DNA
atggcggagacccctgaggc

SEQ ID NO: 8265 - DNA, 20 bp, synthetic construct
  misc_feature 1..20: note = Description of Artificial Sequence: Synthetic oligonucleotide
  misc_feature 1..20: note = Target: ANGPTL4; (-) strand; PAM type: NRG; PAM sequence: AGG
  source 1..20: mol_type = other DNA
aaaaatggcggagacccctg

SEQ ID NO: 8266 - DNA, 20 bp, synthetic construct
  misc_feature 1..20: note = Description of Artificial Sequence: Synthetic oligonucleotide
  misc_feature 1..20: note = Target: ANGPTL4; (-) strand; PAM type: NRG; PAM sequence: GAG
  source 1..20: mol_type = other DNA
caaaaatggcggagacccct

SEQ ID NO: 8267 - DNA, 20 bp, synthetic construct
  misc_feature 1..20: note = Description of Artificial Sequence: Synthetic oligonucleotide
  misc_feature 1..20: note = Target: ANGPTL4; (-) strand; PAM type: NRG; PAM sequence: GAG
  source 1..20: mol_type = other DNA
gcagttcaccaaaaatggcg

SEQ ID NO: 8268 - DNA, 20 bp, synthetic construct
  misc_feature 1..20: note = Description of Artificial Sequence: Synthetic oligonucleotide
  misc_feature 1..20: note = Target: ANGPTL4; (-) strand; PAM type: NRG; PAM sequence: CGG
  source 1..20: mol_type = other DNA
ttgcagttcaccaaaaatgg

SEQ ID NO: 8269 - DNA, 20 bp, synthetic construct
  misc_feature 1..20: note = Description of Artificial Sequence: Synthetic oligonucleotide
  misc_feature 1..20: note = Target: ANGPTL4; (-) strand; PAM type: NRG; PAM sequence: TGG
  source 1..20: mol_type = other DNA
atcttgcagttcaccaaaaa

SEQ ID NO: 8270 - DNA, 20 bp, synthetic construct
  misc_feature 1..20: note = Description of Artificial Sequence: Synthetic oligonucleotide
  misc_feature 1..20: note = Target: ANGPTL4; (-) strand; PAM type: NRG; PAM sequence: CAG
  source 1..20: mol_type = other DNA
ccctacctgaggtcatcttg

SEQ ID NO: 8271 - DNA, 20 bp, synthetic construct
  misc_feature 1..20: note = Description of Artificial Sequence: Synthetic oligonucleotide
  misc_feature 1..20: note = Target: ANGPTL4; (-) strand; PAM type: NRG; PAM sequence: AGG
  source 1..20: mol_type = other DNA
ggactaacacaccctacctg

SEQ ID NO: 8272 - DNA, 20 bp, synthetic construct
  misc_feature 1..20: note = Description of Artificial Sequence: Synthetic oligonucleotide
  misc_feature 1..20: note = Target: ANGPTL4; (-) strand; PAM type: NRG; PAM sequence: GAG
  source 1..20: mol_type = other DNA
tggactaacacaccctacct

SEQ ID NO: 8273 - DNA, 20 bp, synthetic construct
  misc_feature 1..20: note = Description of Artificial Sequence: Synthetic oligonucleotide
  misc_feature 1..20: note = Target: ANGPTL4; (-) strand; PAM type: NRG; PAM sequence: TGG
  source 1..20: mol_type = other DNA
atggggagaggggcccctgg

SEQ ID NO: 8274 - DNA, 20 bp, synthetic construct
  misc_feature 1..20: note = Description of Artificial Sequence: Synthetic oligonucleotide
  misc_feature 1..20: note = Target: ANGPTL4; (-) strand; PAM type: NRG; PAM sequence: TGG
  source 1..20: mol_type = other DNA
cctatggggagaggggcccc

SEQ ID NO: 8275 - DNA, 20 bp, synthetic construct
  misc_feature 1..20: note = Description of Artificial Sequence: Synthetic oligonucleotide
  misc_feature 1..20: note = Target: ANGPTL4; (-) strand; PAM type: NRG; PAM sequence: GGG
  source 1..20: mol_type = other DNA
aacagggcctatggggagag

SEQ ID NO: 8276 - DNA, 20 bp, synthetic construct
  misc_feature 1..20: note = Description of Artificial Sequence: Synthetic oligonucleotide
  misc_feature 1..20: note = Target: ANGPTL4; (-) strand; PAM type: NRG; PAM sequence: GGG
  source 1..20: mol_type = other DNA
caacagggcctatggggaga

SEQ ID NO: 8277 - DNA, 20 bp, synthetic construct
  misc_feature 1..20: note = Description of Artificial Sequence: Synthetic oligonucleotide
  misc_feature 1..20: note = Target: ANGPTL4; (-) strand; PAM type: NRG; PAM sequence: AGG
  source 1..20: mol_type = other DNA
acaacagggcctatggggag

SEQ ID NO: 8278 - DNA, 20 bp, synthetic construct
  misc_feature 1..20: note = Description of Artificial Sequence: Synthetic oligonucleotide
  misc_feature 1..20: note = Target: ANGPTL4; (-) strand; PAM type: NRG; PAM sequence: GAG
  source 1..20: mol_type = other DNA
gacaacagggcctatgggga

SEQ ID NO: 8279 - DNA, 20 bp, synthetic construct
  misc_feature 1..20: note = Description of Artificial Sequence: Synthetic oligonucleotide
  misc_feature 1..20: note = Target: ANGPTL4; (-) strand; PAM type: NRG; PAM sequence: GAG
  source 1..20: mol_type = other DNA
aagacaacagggcctatggg

SEQ ID NO: 8280 - DNA, 20 bp, synthetic construct
  misc_feature 1..20: note = Description of Artificial Sequence: Synthetic oligonucleotide
  misc_feature 1..20: note = Target: ANGPTL4; (-) strand; PAM type: NRG; PAM sequence: GGG
  source 1..20: mol_type = other DNA
gaaagacaacagggcctatg

SEQ ID NO: 8281 - DNA, 20 bp, synthetic construct
  misc_feature 1..20: note = Description of Artificial Sequence: Synthetic oligonucleotide
  misc_feature 1..20: note = Target: ANGPTL4; (-) strand; PAM type: NRG; PAM sequence: GGG
  source 1..20: mol_type = other DNA
agaaagacaacagggcctat

SEQ ID NO: 8282 - DNA, 20 bp, synthetic construct
  misc_feature 1..20: note = Description of Artificial Sequence: Synthetic oligonucleotide
  misc_feature 1..20: note = Target: ANGPTL4; (-) strand; PAM type: NRG; PAM sequence: TGG
  source 1..20: mol_type = other DNA
aagaaagacaacagggccta

SEQ ID NO: 8283 - DNA, 20 bp, synthetic construct
  misc_feature 1..20: note = Description of Artificial Sequence: Synthetic oligonucleotide
  misc_feature 1..20: note = Target: ANGPTL4; (-) strand; PAM type: NRG; PAM sequence: GGG
  source 1..20: mol_type = other DNA
caatttaaagaaagacaaca

SEQ ID NO: 8284 - DNA, 20 bp, synthetic construct
  misc_feature 1..20: note = Description of Artificial Sequence: Synthetic oligonucleotide
  misc_feature 1..20: note = Target: ANGPTL4; (-) strand; PAM type: NRG; PAM sequence: AGG
  source 1..20: mol_type = other DNA
tcaatttaaagaaagacaac

SEQ ID NO: 8285 - DNA, 20 bp, synthetic construct
  misc_feature 1..20: note = Description of Artificial Sequence: Synthetic oligonucleotide
  misc_feature 1..20: note = Target: ANGPTL4; (-) strand; PAM type: NRG; PAM sequence: CAG
  source 1..20: mol_type = other DNA
ttcaatttaaagaaagacaa

SEQ ID NO: 8286 - DNA, 20 bp, synthetic construct
  misc_feature 1..20: note = Description of Artificial Sequence: Synthetic oligonucleotide
  misc_feature 1..20: note = Target: ANGPTL4; (-) strand; PAM type: NRG; PAM sequence: AAG
  source 1..20: mol_type = other DNA
ttttgttttcaatttaaaga

SEQ ID NO: 8287 - DNA, 20 bp, synthetic construct
  misc_feature 1..20: note = Description of Artificial Sequence: Synthetic oligonucleotide
  misc_feature 1..20: note = Target: ANGPTL4; (-) strand; PAM type: NRG; PAM sequence: AAG
  source 1..20: mol_type = other DNA
tttgttttgttttcaattta

SEQ ID NO: 8288 - DNA, 20 bp, synthetic construct
  misc_feature 1..20: note = Description of Artificial Sequence: Synthetic oligonucleotide
  misc_feature 1..20: note = Target: ANGPTL4; (-) strand; PAM type: NRG; PAM sequence: AAG
  source 1..20: mol_type = other DNA
accagcttgggcaacatagc

SEQ ID NO: 8289 - DNA, 20 bp, synthetic construct
  misc_feature 1..20: note = Description of Artificial Sequence: Synthetic oligonucleotide
  misc_feature 1..20: note = Target: ANGPTL4; (-) strand; PAM type: NRG; PAM sequence: TAG
  source 1..20: mol_type = other DNA
aaagaccagcttgggcaaca

SEQ ID NO: 8290 - DNA, 20 bp, synthetic construct
  misc_feature 1..20: note = Description of Artificial Sequence: Synthetic oligonucleotide
  misc_feature 1..20: note = Target: ANGPTL4; (-) strand; PAM type: NRG; PAM sequence: GGG
  source 1..20: mol_type = other DNA
aaaaaaaaaaagaccagctt

SEQ ID NO: 8291 - DNA, 20 bp, synthetic construct
  misc_feature 1..20: note = Description of Artificial Sequence: Synthetic oligonucleotide
  misc_feature 1..20: note = Target: ANGPTL4; (-) strand; PAM type: NRG; PAM sequence: TGG
  source 1..20: mol_type = other DNA
aaaaaaaaaaaagaccagct

SEQ ID NO: 8292 - DNA, 20 bp, synthetic construct
  misc_feature 1..20: note = Description of Artificial Sequence: Synthetic oligonucleotide
  misc_feature 1..20: note = Target: ANGPTL4; (-) strand; PAM type: NRG; PAM sequence: CAG
  source 1..20: mol_type = other DNA
aaaaaaaaaaaaaaaaagac

SEQ ID NO: 8293 - DNA, 20 bp, synthetic construct
  misc_feature 1..20: note = Description of Artificial Sequence: Synthetic oligonucleotide
  misc_feature 1..20: note = Target: ANGPTL4; (-) strand; PAM type: NRG; PAM sequence: AAG
  source 1..20: mol_type = other DNA
caaaaaaaaaaaaaaaaaaa

SEQ ID NO: 8294 - DNA, 20 bp, synthetic construct
  misc_feature 1..20: note = Description of Artificial Sequence: Synthetic oligonucleotide
  misc_feature 1..20: note = Target: ANGPTL4; (-) strand; PAM type: NRG; PAM sequence: GAG
  source 1..20: mol_type = other DNA
gcattgcactccagctccaa

SEQ ID NO: 8295 - DNA, 20 bp, synthetic construct
  misc_feature 1..20: note = Description of Artificial Sequence: Synthetic oligonucleotide
  misc_feature 1..20: note = Target: ANGPTL4; (-) strand; PAM type: NRG; PAM sequence: AAG
  source 1..20: mol_type = other DNA
tggcattgcactccagctcc

SEQ ID NO: 8296 - DNA, 20 bp, synthetic construct
  misc_feature 1..20: note = Description of Artificial Sequence: Synthetic oligonucleotide
  misc_feature 1..20: note = Target: ANGPTL4; (-) strand; PAM type: NRG; PAM sequence: CAG
  source 1..20: mol_type = other DNA
gagatcgtggcattgcactc

SEQ ID NO: 8297 - DNA, 20 bp, synthetic construct
  misc_feature 1..20: note = Description of Artificial Sequence: Synthetic oligonucleotide
  misc_feature 1..20: note = Target: ANGPTL4; (-) strand; PAM type: NRG; PAM sequence: TGG
  source 1..20: mol_type = other DNA
gtttcagtgagctgagatcg

SEQ ID NO: 8298 - DNA, 20 bp, synthetic construct
  misc_feature 1..20: note = Description of Artificial Sequence: Synthetic oligonucleotide
  misc_feature 1..20: note = Target: ANGPTL4; (-) strand; PAM type: NRG; PAM sequence: GAG
  source 1..20: mol_type = other DNA
ggcggaggtttcagtgagct

SEQ ID NO: 8299 - DNA, 20 bp, synthetic construct
  misc_feature 1..20: note = Description of Artificial Sequence: Synthetic oligonucleotide
  misc_feature 1..20: note = Target: ANGPTL4; (-) strand; PAM type: NRG; PAM sequence: GAG
  source 1..20: mol_type = other DNA
cgggaggcggaggtttcagt

SEQ ID NO: 8300 - DNA, 20 bp, synthetic construct
  misc_feature 1..20: note = Description of Artificial Sequence: Synthetic oligonucleotide
  misc_feature 1..20: note = Target: ANGPTL4; (-) strand; PAM type: NRG; PAM sequence: CAG
  source 1..20: mol_type = other DNA
aacccgggaggcggaggttt

SEQ ID NO: 8301 - DNA, 20 bp, synthetic construct
  misc_feature 1..20: note = Description of Artificial Sequence: Synthetic oligonucleotide
  misc_feature 1..20: note = Target: ANGPTL4; (-) strand; PAM type: NRG; PAM sequence: AGG
  source 1..20: mol_type = other DNA
tgcttgaacccgggaggcgg

SEQ ID NO: 8302 - DNA, 20 bp, synthetic construct
  misc_feature 1..20: note = Description of Artificial Sequence: Synthetic oligonucleotide
  misc_feature 1..20: note = Target: ANGPTL4; (-) strand; PAM type: NRG; PAM sequence: GAG
  source 1..20: mol_type = other DNA
ttgcttgaacccgggaggcg

SEQ ID NO: 8303 - DNA, 20 bp, synthetic construct
  misc_feature 1..20: note = Description of Artificial Sequence: Synthetic oligonucleotide
  misc_feature 1..20: note = Target: ANGPTL4; (-) strand; PAM type: NRG; PAM sequence: CGG
  source 1..20: mol_type = other DNA
aattgcttgaacccgggagg

SEQ ID NO: 8304 - DNA, 20 bp, synthetic construct
  misc_feature 1..20: note = Description of Artificial Sequence: Synthetic oligonucleotide
  misc_feature 1..20: note = Target: ANGPTL4; (-) strand; PAM type: NRG; PAM sequence: AGG
  source 1..20: mol_type = other DNA
gagaattgcttgaacccggg

SEQ ID NO: 8305 - DNA, 20 bp, synthetic construct
  misc_feature 1..20: note = Description of Artificial Sequence: Synthetic oligonucleotide
  misc_feature 1..20: note = Target: ANGPTL4; (-) strand; PAM type: NRG; PAM sequence: GAG
  source 1..20: mol_type = other DNA
ggagaattgcttgaacccgg

SEQ ID NO: 8306 - DNA, 20 bp, synthetic construct
  misc_feature 1..20: note = Description of Artificial Sequence: Synthetic oligonucleotide
  misc_feature 1..20: note = Target: ANGPTL4; (-) strand; PAM type: NRG; PAM sequence: GGG
  source 1..20: mol_type = other DNA
ctggagaattgcttgaaccc

SEQ ID NO: 8307 - DNA, 20 bp, synthetic construct
  misc_feature 1..20: note = Description of Artificial Sequence: Synthetic oligonucleotide
  misc_feature 1..20: note = Target: ANGPTL4; (-) strand; PAM type: NRG; PAM sequence: CGG
  source 1..20: mol_type = other DNA
gctggagaattgcttgaacc

SEQ ID NO: 8308 - DNA, 20 bp, synthetic construct
  misc_feature 1..20: note = Description of Artificial Sequence: Synthetic oligonucleotide
  misc_feature 1..20: note = Target: ANGPTL4; (-) strand; PAM type: NRG; PAM sequence: GAG
  source 1..20: mol_type = other DNA
tactggggaggctgacgctg

SEQ ID NO: 8309 - DNA, 20 bp, synthetic construct
  misc_feature 1..20: note = Description of Artificial Sequence: Synthetic oligonucleotide
  misc_feature 1..20: note = Target: ANGPTL4; (-) strand; PAM type: NRG; PAM sequence: TGG
  source 1..20: mol_type = other DNA
gctactggggaggctgacgc

SEQ ID NO: 8310 - DNA, 20 bp, synthetic construct
  misc_feature 1..20: note = Description of Artificial Sequence: Synthetic oligonucleotide
  misc_feature 1..20: note = Target: ANGPTL4; (-) strand; PAM type: NRG; PAM sequence: AGG
  source 1..20: mol_type = other DNA
tgtagtctcagctactgggg

SEQ ID NO: 8311 - DNA, 20 bp, synthetic construct
  misc_feature 1..20: note = Description of Artificial Sequence: Synthetic oligonucleotide
  misc_feature 1..20: note = Target: ANGPTL4; (-) strand; PAM type: NRG; PAM sequence: GAG
  source 1..20: mol_type = other DNA
ctgtagtctcagctactggg

SEQ ID NO: 8312 - DNA, 20 bp, synthetic construct
  misc_feature 1..20: note = Description of Artificial Sequence: Synthetic oligonucleotide
  misc_feature 1..20: note = Target: ANGPTL4; (-) strand; PAM type: NRG; PAM sequence: GGG
  source 1..20: mol_type = other DNA
acctgtagtctcagctactg

SEQ ID NO: 8313 - DNA, 20 bp, synthetic construct
  misc_feature 1..20: note = Description of Artificial Sequence: Synthetic oligonucleotide
  misc_feature 1..20: note = Target: ANGPTL4; (-) strand; PAM type: NRG; PAM sequence: GGG
  source 1..20: mol_type = other DNA
cacctgtagtctcagctact

SEQ ID NO: 8314 - DNA, 20 bp, synthetic construct
  misc_feature 1..20: note = Description of Artificial Sequence: Synthetic oligonucleotide
  misc_feature 1..20: note = Target: ANGPTL4; (-) strand; PAM type: NRG; PAM sequence: TGG
  source 1..20: mol_type = other DNA
gcacctgtagtctcagctac

SEQ ID NO: 8315 - DNA, 20 bp, synthetic construct
  misc_feature 1..20: note = Description of Artificial Sequence: Synthetic oligonucleotide
  misc_feature 1..20: note = Target: ANGPTL4; (-) strand; PAM type: NRG; PAM sequence: CAG
  source 1..20: mol_type = other DNA
gttgctcgcacctgtagtct

SEQ ID NO: 8316 - DNA, 20 bp, synthetic construct
  misc_feature 1..20: note = Description of Artificial Sequence: Synthetic oligonucleotide
  misc_feature 1..20: note = Target: ANGPTL4; (-) strand; PAM type: NRG; PAM sequence: TAG
  source 1..20: mol_type = other DNA
ggtgtggttgctcgcacctg

SEQ ID NO: 8317 - DNA, 20 bp, synthetic construct
  misc_feature 1..20: note = Description of Artificial Sequence: Synthetic oligonucleotide
  misc_feature 1..20: note = Target: ANGPTL4; (-) strand; PAM type: NRG; PAM sequence: TGG
  source 1..20: mol_type = other DNA
atacaaaaattagctgggtg

SEQ ID NO: 8318 - DNA, 20 bp, synthetic construct
  misc_feature 1..20: note = Description of Artificial Sequence: Synthetic oligonucleotide
  misc_feature 1..20: note = Target: ANGPTL4; (-) strand; PAM type: NRG; PAM sequence: GGG
  source 1..20: mol_type = other DNA
taaaaatacaaaaattagct

SEQ ID NO: 8319 - DNA, 20 bp, synthetic construct
  misc_feature 1..20: note = Description of Artificial Sequence: Synthetic oligonucleotide
  misc_feature 1..20: note = Target: ANGPTL4; (-) strand; PAM type: NRG; PAM sequence: TGG
  source 1..20: mol_type = other DNA
ctaaaaatacaaaaattagc

SEQ ID NO: 8320 - DNA, 20 bp, synthetic construct
  misc_feature 1..20: note = Description of Artificial Sequence: Synthetic oligonucleotide
  misc_feature 1..20: note = Target: ANGPTL4; (-) strand; PAM type: NRG; PAM sequence: TAG
  source 1..20: mol_type = other DNA
tctactaaaaatacaaaaat

SEQ ID NO: 8321 - DNA, 20 bp, synthetic construct
  misc_feature 1..20: note = Description of Artificial Sequence: Synthetic oligonucleotide
  misc_feature 1..20: note = Target: ANGPTL4; (-) strand; PAM type: NRG; PAM sequence: CAG
  source 1..20: mol_type = other DNA
cagaccaacatggtgaaacc

SEQ ID NO: 8322 - DNA, 20 bp, synthetic construct
  misc_feature 1..20: note = Description of Artificial Sequence: Synthetic oligonucleotide
  misc_feature 1..20: note = Target: ANGPTL4; (-) strand; PAM type: NRG; PAM sequence: TGG
  source 1..20: mol_type = other DNA
tgagaccagccagaccaaca

SEQ ID NO: 8323 - DNA, 20 bp, synthetic construct
  misc_feature 1..20: note = Description of Artificial Sequence: Synthetic oligonucleotide
  misc_feature 1..20: note = Target: ANGPTL4; (-) strand; PAM type: NRG; PAM sequence: CAG
  source 1..20: mol_type = other DNA
gtcaggagtttgagaccagc

SEQ ID NO: 8324 - DNA, 20 bp, synthetic construct
  misc_feature 1..20: note = Description of Artificial Sequence: Synthetic oligonucleotide
  misc_feature 1..20: note = Target: ANGPTL4; (-) strand; PAM type: NRG; PAM sequence: CAG
  source 1..20: mol_type = other DNA
tgaggtcaggagtttgagac

SEQ ID NO: 8325 - DNA, 20 bp, synthetic construct
  misc_feature 1..20: note = Description of Artificial Sequence: Synthetic oligonucleotide
  misc_feature 1..20: note = Target: ANGPTL4; (-) strand; PAM type: NRG; PAM sequence: GAG
  source 1..20: mol_type = other DNA
tcatttgaggtcaggagttt

SEQ ID NO: 8326 - DNA, 20 bp, synthetic construct
  misc_feature 1..20: note = Description of Artificial Sequence: Synthetic oligonucleotide
  misc_feature 1..20: note = Target: ANGPTL4; (-) strand; PAM type: NRG; PAM sequence: GAG
  source 1..20: mol_type = other DNA
ggcaaatcatttgaggtcag

SEQ ID NO: 8327 - DNA, 20 bp, synthetic construct
  misc_feature 1..20: note = Description of Artificial Sequence: Synthetic oligonucleotide
  misc_feature 1..20: note = Target: ANGPTL4; (-) strand; PAM type: NRG; PAM sequence: AGG
  source 1..20: mol_type = other DNA
tcggcaaatcatttgaggtc

SEQ ID NO: 8328 - DNA, 20 bp, synthetic construct
  misc_feature 1..20: note = Description of Artificial Sequence: Synthetic oligonucleotide
  misc_feature 1..20: note = Target: ANGPTL4; (-) strand; PAM type: NRG; PAM sequence: CAG
  source 1..20: mol_type = other DNA
gtcggcaaatcatttgaggt

SEQ ID NO: 8329 - DNA, 20 bp, synthetic construct
  misc_feature 1..20: note = Description of Artificial Sequence: Synthetic oligonucleotide
  misc_feature 1..20: note = Target: ANGPTL4; (-) strand; PAM type: NRG; PAM sequence: AGG
  source 1..20: mol_type = other DNA
caaagtcggcaaatcatttg

SEQ ID NO: 8330 - DNA, 20 bp, synthetic construct
  misc_feature 1..20: note = Description of Artificial Sequence: Synthetic oligonucleotide
  misc_feature 1..20: note = Target: ANGPTL4; (-) strand; PAM type: NRG; PAM sequence: GAG
  source 1..20: mol_type = other DNA
ccaaagtcggcaaatcattt

SEQ ID NO: 8331 - DNA, 20 bp, synthetic construct
  misc_feature 1..20: note = Description of Artificial Sequence: Synthetic oligonucleotide
  misc_feature 1..20: note = Target: ANGPTL4; (-) strand; PAM type: NRG; PAM sequence: CGG
  source 1..20: mol_type = other DNA
gcattttgggaggccaaagt

SEQ ID NO: 8332 - DNA, 20 bp, synthetic construct
  misc_feature 1..20: note = Description of Artificial Sequence: Synthetic oligonucleotide
  misc_feature 1..20: note = Target: ANGPTL4; (-) strand; PAM type: NRG; PAM sequence: AAG
  source 1..20: mol_type = other DNA
cccagcattttgggaggcca

SEQ ID NO: 8333 - DNA, 20 bp, synthetic construct
  misc_feature 1..20: note = Description of Artificial Sequence: Synthetic oligonucleotide
  misc_feature 1..20: note = Target: ANGPTL4; (-) strand; PAM type: NRG; PAM sequence: AGG
  source 1..20: mol_type = other DNA
tataatcccagcattttggg

SEQ ID NO: 8334 - DNA, 20 bp, synthetic construct
  misc_feature 1..20: note = Description of Artificial Sequence: Synthetic oligonucleotide
  misc_feature 1..20: note = Target: ANGPTL4; (-) strand; PAM type: NRG; PAM sequence: GAG
  source 1..20: mol_type = other DNA
ctataatcccagcattttgg

SEQ ID NO: 8335 - DNA, 20 bp, synthetic construct
  misc_feature 1..20: note = Description of Artificial Sequence: Synthetic oligonucleotide
  misc_feature 1..20: note = Target: ANGPTL4; (-) strand; PAM type: NRG; PAM sequence: GGG
  source 1..20: mol_type = other DNA
gcctataatcccagcatttt

SEQ ID NO: 8336 - DNA, 20 bp, synthetic construct
  misc_feature 1..20: note = Description of Artificial Sequence: Synthetic oligonucleotide
  misc_feature 1..20: note = Target: ANGPTL4; (-) strand; PAM type: NRG; PAM sequence: TGG
  source 1..20: mol_type = other DNA
tgcctataatcccagcattt

SEQ ID NO: 8337 - DNA, 20 bp, synthetic construct
  misc_feature 1..20: note = Description of Artificial Sequence: Synthetic oligonucleotide
  misc_feature 1..20: note = Target: ANGPTL4; (-) strand; PAM type: NRG; PAM sequence: CAG
  source 1..20: mol_type = other DNA
gtggctaatgcctataatcc

SEQ ID NO: 8338 - DNA, 20 bp, synthetic construct
  misc_feature 1..20: note = Description of Artificial Sequence: Synthetic oligonucleotide
  misc_feature 1..20: note = Target: ANGPTL4; (-) strand; PAM type: NRG; PAM sequence: TGG
  source 1..20: mol_type = other DNA
agaaaagaggccaggagcag

SEQ ID NO: 8339 - DNA, 20 bp, synthetic construct
  misc_feature 1..20: note = Description of Artificial Sequence: Synthetic oligonucleotide
  misc_feature 1..20: note = Target: ANGPTL4; (-) strand; PAM type: NRG; PAM sequence: CAG
  source 1..20: mol_type = other DNA
taaagaaaagaggccaggag

SEQ ID NO: 8340 - DNA, 20 bp, synthetic construct
  misc_feature 1..20: note = Description of Artificial Sequence: Synthetic oligonucleotide
  misc_feature 1..20: note = Target: ANGPTL4; (-) strand; PAM type: NRG; PAM sequence: GAG
  source 1..20: mol_type = other DNA
ttttaaagaaaagaggccag

SEQ ID NO: 8341 - DNA, 20 bp, synthetic construct
  misc_feature 1..20: note = Description of Artificial Sequence: Synthetic oligonucleotide
  misc_feature 1..20: note = Target: ANGPTL4; (-) strand; PAM type: NRG; PAM sequence: AGG
  source 1..20: mol_type = other DNA
cattttaaagaaaagaggcc

SEQ ID NO: 8342 - DNA, 20 bp, synthetic construct
  misc_feature 1..20: note = Description of Artificial Sequence: Synthetic oligonucleotide
  misc_feature 1..20: note = Target: ANGPTL4; (-) strand; PAM type: NRG; PAM sequence: CAG
  source 1..20: mol_type = other DNA
gcattttaaagaaaagaggc

SEQ ID NO: 8343 - DNA, 20 bp, synthetic construct
  misc_feature 1..20: note = Description of Artificial Sequence: Synthetic oligonucleotide
  misc_feature 1..20: note = Target: ANGPTL4; (-) strand; PAM type: NRG; PAM sequence: AGG
  source 1..20: mol_type = other DNA
ggctgcattttaaagaaaag

SEQ ID NO: 8344 - DNA, 20 bp, synthetic construct
  misc_feature 1..20: note = Description of Artificial Sequence: Synthetic oligonucleotide
  misc_feature 1..20: note = Target: ANGPTL4; (-) strand; PAM type: NRG; PAM sequence: GAG
  source 1..20: mol_type = other DNA
gggctgcattttaaagaaaa

SEQ ID NO: 8345 - DNA, 20 bp, synthetic construct
  misc_feature 1..20: note = Description of Artificial Sequence: Synthetic oligonucleotide
  misc_feature 1..20: note = Target: ANGPTL4; (-) strand; PAM type: NRG; PAM sequence: AAG
  source 1..20: mol_type = other DNA
aagggctgcattttaaagaa

SEQ ID NO: 8346 - DNA, 20 bp, synthetic construct
  misc_feature 1..20: note = Description of Artificial Sequence: Synthetic oligonucleotide
  misc_feature 1..20: note = Target: ANGPTL4; (-) strand; PAM type: NRG; PAM sequence: AAG
  source 1..20: mol_type = other DNA
cagacaagggctgcatttta

SEQ ID NO: 8347 - DNA, 20 bp, synthetic construct
  misc_feature 1..20: note = Description of Artificial Sequence: Synthetic oligonucleotide
  misc_feature 1..20: note = Target: ANGPTL4; (-) strand; PAM type: NRG; PAM sequence: GGG
  source 1..20: mol_type = other DNA
gagccactacacccagacaa

SEQ ID NO: 8348 - DNA, 20 bp, synthetic construct
  misc_feature 1..20: note = Description of Artificial Sequence: Synthetic oligonucleotide
  misc_feature 1..20: note = Target: ANGPTL4; (-) strand; PAM type: NRG; PAM sequence: AGG
  source 1..20: mol_type = other DNA
tgagccactacacccagaca

SEQ ID NO: 8349 - DNA, 20 bp, synthetic construct
  misc_feature 1..20: note = Description of Artificial Sequence: Synthetic oligonucleotide
  misc_feature 1..20: note = Target: ANGPTL4; (-) strand; PAM type: NRG; PAM sequence: AAG
  source 1..20: mol_type = other DNA
atgagccactacacccagac

SEQ ID NO: 8350 - DNA, 20 bp, synthetic construct
  misc_feature 1..20: note = Description of Artificial Sequence: Synthetic oligonucleotide
  misc_feature 1..20: note = Target: ANGPTL4; (-) strand; PAM type: NRG; PAM sequence: CAG
  source 1..20: mol_type = other DNA
cagatatgagccactacacc

SEQ ID NO: 8351 - DNA, 20 bp, synthetic construct
  misc_feature 1..20: note = Description of Artificial Sequence: Synthetic oligonucleotide
  misc_feature 1..20: note = Target: ANGPTL4; (-) strand; PAM type: NRG; PAM sequence: GAG
  source 1..20: mol_type = other DNA
agtgtcgggattacagatat

SEQ ID NO: 8352 - DNA, 20 bp, synthetic construct
  misc_feature 1..20: note = Description of Artificial Sequence: Synthetic oligonucleotide
  misc_feature 1..20: note = Target: ANGPTL4; (-) strand; PAM type: NRG; PAM sequence: CAG
  source 1..20: mol_type = other DNA
ctcccaaagtgtcgggatta

SEQ ID NO: 8353 - DNA, 20 bp, synthetic construct
  misc_feature 1..20: note = Description of Artificial Sequence: Synthetic oligonucleotide
  misc_feature 1..20: note = Target: ANGPTL4; (-) strand; PAM type: NRG; PAM sequence: GGG
  source 1..20: mol_type = other DNA
gataggcctcccaaagtgtc

SEQ ID NO: 8354 - DNA, 20 bp, synthetic construct
  misc_feature 1..20: note = Description of Artificial Sequence: Synthetic oligonucleotide
  misc_feature 1..20: note = Target: ANGPTL4; (-) strand; PAM type: NRG; PAM sequence: CGG
  source 1..20: mol_type = other DNA
tgataggcctcccaaagtgt

SEQ ID NO: 8355 - DNA, 20 bp, synthetic construct
  misc_feature 1..20: note = Description of Artificial Sequence: Synthetic oligonucleotide
  misc_feature 1..20: note = Target: ANGPTL4; (-) strand; PAM type: NRG; PAM sequence: AAG
  source 1..20: mol_type = other DNA
tcctcatgataggcctccca

SEQ ID NO: 8356 - DNA, 20 bp, synthetic construct
  misc_feature 1..20: note = Description of Artificial Sequence: Synthetic oligonucleotide
  misc_feature 1..20: note = Target: ANGPTL4; (-) strand; PAM type: NRG; PAM sequence: AGG
  source 1..20: mol_type = other DNA
gctcaagtgatcctcatgat

SEQ ID NO: 8357 - DNA, 20 bp, synthetic construct
  misc_feature 1..20: note = Description of Artificial Sequence: Synthetic oligonucleotide
  misc_feature 1..20: note = Target: ANGPTL4; (-) strand; PAM type: NRG; PAM sequence: TAG
  source 1..20: mol_type = other DNA
ggctcaagtgatcctcatga

SEQ ID NO: 8358 - DNA, 20 bp, synthetic construct
  misc_feature 1..20: note = Description of Artificial Sequence: Synthetic oligonucleotide
  misc_feature 1..20: note = Target: ANGPTL4; (-) strand; PAM type: NRG; PAM sequence: AAG
  source 1..20: mol_type = other DNA
ggtctcgaacttctgggctc

SEQ ID NO: 8359 - DNA, 20 bp, synthetic construct
  misc_feature 1..20: note = Description of Artificial Sequence: Synthetic oligonucleotide
  misc_feature 1..20: note = Target: ANGPTL4; (-) strand; PAM type: NRG; PAM sequence: GGG
  source 1..20: mol_type = other DNA
caggctggtctcgaacttct

SEQ ID NO: 8360 - DNA, 20 bp, synthetic construct
  misc_feature 1..20: note = Description of Artificial Sequence: Synthetic oligonucleotide
  misc_feature 1..20: note = Target: ANGPTL4; (-) strand; PAM type: NRG; PAM sequence: TGG
  source 1..20: mol_type = other DNA
ccaggctggtctcgaacttc

SEQ ID NO: 8361 - DNA, 20 bp, synthetic construct
  misc_feature 1..20: note = Description of Artificial Sequence: Synthetic oligonucleotide
  misc_feature 1..20: note = Target: ANGPTL4; (-) strand; PAM type: NRG; PAM sequence: TGG
  source 1..20: mol_type = other DNA
tctcactatgttgtccaggc

SEQ ID NO: 8362 - DNA, 20 bp, synthetic construct
  misc_feature 1..20: note = Description of Artificial Sequence: Synthetic oligonucleotide
  misc_feature 1..20: note = Target: ANGPTL4; (-) strand; PAM type: NRG; PAM sequence: AGG
  source 1..20: mol_type = other DNA
gagctctcactatgttgtcc

SEQ ID NO: 8363 - DNA, 20 bp, synthetic construct
  misc_feature 1..20: note = Description of Artificial Sequence: Synthetic oligonucleotide
  misc_feature 1..20: note = Target: ANGPTL4; (-) strand; PAM type: NRG; PAM sequence: CAG
  source 1..20: mol_type = other DNA
tgagctctcactatgttgtc

SEQ ID NO: 8364 - DNA, 20 bp, synthetic construct
  misc_feature 1..20: note = Description of Artificial Sequence: Synthetic oligonucleotide
  misc_feature 1..20: note = Target: ANGPTL4; (-) strand; PAM type: NRG; PAM sequence: GAG
  source 1..20: mol_type = other DNA
acaaaattttttgtaaagat

SEQ ID NO: 8365 - DNA, 20 bp, synthetic construct
  misc_feature 1..20: note = Description of Artificial Sequence: Synthetic oligonucleotide
  misc_feature 1..20: note = Target: ANGPTL4; (-) strand; PAM type: NRG; PAM sequence: AAG
  source 1..20: mol_type = other DNA
cttttacaaaattttttgta

SEQ ID NO: 8366 - DNA, 20 bp, synthetic construct
  misc_feature 1..20: note = Description of Artificial Sequence: Synthetic oligonucleotide
  misc_feature 1..20: note = Target: ANGPTL4; (-) strand; PAM type: NRG; PAM sequence: TGG
  source 1..20: mol_type = other DNA
caggtgtgagccactgcact

SEQ ID NO: 8367 - DNA, 20 bp, synthetic construct
  misc_feature 1..20: note = Description of Artificial Sequence: Synthetic oligonucleotide
  misc_feature 1..20: note = Target: ANGPTL4; (-) strand; PAM type: NRG; PAM sequence: GAG
  source 1..20: mol_type = other DNA
agtgctgggattacaggtgt

SEQ ID NO: 8368 - DNA, 20 bp, synthetic construct
  misc_feature 1..20: note = Description of Artificial Sequence: Synthetic oligonucleotide
  misc_feature 1..20: note = Target: ANGPTL4; (-) strand; PAM type: NRG; PAM sequence: AGG
  source 1..20: mol_type = other DNA
tcccaaagtgctgggattac

SEQ ID NO: 8369 - DNA, 20 bp, synthetic construct
  misc_feature 1..20: note = Description of Artificial Sequence: Synthetic oligonucleotide
  misc_feature 1..20: note = Target: ANGPTL4; (-) strand; PAM type: NRG; PAM sequence: CAG
  source 1..20: mol_type = other DNA
ctcccaaagtgctgggatta

SEQ ID NO: 8370 - DNA, 20 bp, synthetic construct
  misc_feature 1..20: note = Description of Artificial Sequence: Synthetic oligonucleotide
  misc_feature 1..20: note = Target: ANGPTL4; (-) strand; PAM type: NRG; PAM sequence: GGG
  source 1..20: mol_type = other DNA
cctcaacctcccaaagtgct

SEQ ID NO: 8371 - DNA, 20 bp, synthetic construct
  misc_feature 1..20: note = Description of Artificial Sequence: Synthetic oligonucleotide
  misc_feature 1..20: note = Target: ANGPTL4; (-) strand; PAM type: NRG; PAM sequence: TGG
  source 1..20: mol_type = other DNA
gcctcaacctcccaaagtgc

SEQ ID NO: 8372 - DNA, 20 bp, synthetic construct
  misc_feature 1..20: note = Description of Artificial Sequence: Synthetic oligonucleotide
  misc_feature 1..20: note = Target: ANGPTL4; (-) strand; PAM type: NRG; PAM sequence: AAG
  source 1..20: mol_type = other DNA
ctgtctgcctcaacctccca

SEQ ID NO: 8373 - DNA, 20 bp, synthetic construct
  misc_feature 1..20: note = Description of Artificial Sequence: Synthetic oligonucleotide
  misc_feature 1..20: note = Target: ANGPTL4; (-) strand; PAM type: NRG; PAM sequence: TGG
  source 1..20: mol_type = other DNA
tttcaccatgttggtcaggc

SEQ ID NO: 8374 - DNA, 20 bp, synthetic construct
  misc_feature 1..20: note = Description of Artificial Sequence: Synthetic oligonucleotide
  misc_feature 1..20: note = Target: ANGPTL4; (-) strand; PAM type: NRG; PAM sequence: AGG
  source 1..20: mol_type = other DNA
ggggtttcaccatgttggtc

SEQ ID NO: 8375 - DNA, 20 bp, synthetic construct
  misc_feature 1..20: note = Description of Artificial Sequence: Synthetic oligonucleotide
  misc_feature 1..20: note = Target: ANGPTL4; (-) strand; PAM type: NRG; PAM sequence: CAG
  source 1..20: mol_type = other DNA
cggggtttcaccatgttggt

SEQ ID NO: 8376 - DNA, 20 bp, synthetic construct
  misc_feature 1..20: note = Description of Artificial Sequence: Synthetic oligonucleotide
  misc_feature 1..20: note = Target: ANGPTL4; (-) strand; PAM type: NRG; PAM sequence: TGG
  source 1..20: mol_type = other DNA
gagacggggtttcaccatgt

SEQ ID NO: 8377 - DNA, 20 bp, synthetic construct
  misc_feature 1..20: note = Description of Artificial Sequence: Synthetic oligonucleotide
  misc_feature 1..20: note = Target: ANGPTL4; (-) strand; PAM type: NRG; PAM sequence: GGG
  source 1..20: mol_type = other DNA
ttgtatttttagtagagacg

SEQ ID NO: 8378 - DNA, 20 bp, synthetic construct
  misc_feature 1..20: note = Description of Artificial Sequence: Synthetic oligonucleotide
  misc_feature 1..20: note = Target: ANGPTL4; (-) strand; PAM type: NRG; PAM sequence: GGG
  source 1..20: mol_type = other DNA
tttgtatttttagtagagac

SEQ ID NO: 8379 - DNA, 20 bp, synthetic construct
  misc_feature 1..20: note = Description of Artificial Sequence: Synthetic oligonucleotide
  misc_feature 1..20: note = Target: ANGPTL4; (-) strand; PAM type: NRG; PAM sequence: CGG
  source 1..20: mol_type = other DNA
ttttgtatttttagtagaga

SEQ ID NO: 8380 - DNA, 20 bp, synthetic construct
  misc_feature 1..20: note = Description of Artificial Sequence: Synthetic oligonucleotide
  misc_feature 1..20: note = Target: ANGPTL4; (-) strand; PAM type: NRG; PAM sequence: GAG
  source 1..20: mol_type = other DNA
taatttttgtatttttagta

SEQ ID NO: 8381 - DNA, 20 bp, synthetic construct
  misc_feature 1..20: note = Description of Artificial Sequence: Synthetic oligonucleotide
  misc_feature 1..20: note = Target: ANGPTL4; (-) strand; PAM type: NRG; PAM sequence: TAG
  source 1..20: mol_type = other DNA
gctaatttttgtatttttag

SEQ ID NO: 8382 - DNA, 20 bp, synthetic construct
  misc_feature 1..20: note = Description of Artificial Sequence: Synthetic oligonucleotide
  misc_feature 1..20: note = Target: ANGPTL4; (-) strand; PAM type: NRG; PAM sequence: TAG
  source 1..20: mol_type = other DNA
ccggctaatttttgtatttt

SEQ ID NO: 8383 - DNA, 20 bp, synthetic construct
  misc_feature 1..20: note = Description of Artificial Sequence: Synthetic oligonucleotide
  misc_feature 1..20: note = Target: ANGPTL4; (-) strand; PAM type: NRG; PAM sequence: CGG
  source 1..20: mol_type = other DNA
caggtgcacaccaccatgcc

SEQ ID NO: 8384 - DNA, 20 bp, synthetic construct
  misc_feature 1..20: note = Description of Artificial Sequence: Synthetic oligonucleotide
  misc_feature 1..20: note = Target: ANGPTL4; (-) strand; PAM type: NRG; PAM sequence: AGG
  source 1..20: mol_type = other DNA
acctgagtagctgggattac

SEQ ID NO: 8385 - DNA, 20 bp, synthetic construct
  misc_feature 1..20: note = Description of Artificial Sequence: Synthetic oligonucleotide
  misc_feature 1..20: note = Target: ANGPTL4; (-) strand; PAM type: NRG; PAM sequence: CAG
  source 1..20: mol_type = other DNA
cacctgagtagctgggatta

SEQ ID NO: 8386 - DNA, 20 bp, synthetic construct
  misc_feature 1..20: note = Description of Artificial Sequence: Synthetic oligonucleotide
  misc_feature 1..20: note = Target: ANGPTL4; (-) strand; PAM type: NRG; PAM sequence: GGG
  source 1..20: mol_type = other DNA
cctcagccacctgagtagct

SEQ ID NO: 8387 - DNA, 20 bp, synthetic construct
  misc_feature 1..20: note = Description of Artificial Sequence: Synthetic oligonucleotide
  misc_feature 1..20: note = Target: ANGPTL4; (-) strand; PAM type: NRG; PAM sequence: TGG
  source 1..20: mol_type = other DNA
gcctcagccacctgagtagc

SEQ ID NO: 8388 - DNA, 20 bp, synthetic construct
  misc_feature 1..20: note = Description of Artificial Sequence: Synthetic oligonucleotide
  misc_feature 1..20: note = Target: ANGPTL4; (-) strand; PAM type: NRG; PAM sequence: TAG
  source 1..20: mol_type = other DNA
tcctgcctcagccacctgag

SEQ ID NO: 8389 - DNA, 20 bp, synthetic construct
  misc_feature 1..20: note = Description of Artificial Sequence: Synthetic oligonucleotide
  misc_feature 1..20: note = Target: ANGPTL4; (-) strand; PAM type: NRG; PAM sequence: GAG
  source 1..20: mol_type = other DNA
ttctcctgcctcagccacct

SEQ ID NO: 8390 - DNA, 20 bp, synthetic construct
  misc_feature 1..20: note = Description of Artificial Sequence: Synthetic oligonucleotide
  misc_feature 1..20: note = Target: ANGPTL4; (-) strand; PAM type: NRG; PAM sequence: CAG
  source 1..20: mol_type = other DNA
ttcaagagattctcctgcct

SEQ ID NO: 8391 - DNA, 20 bp, synthetic construct
  misc_feature 1..20: note = Description of Artificial Sequence: Synthetic oligonucleotide
  misc_feature 1..20: note = Target: ANGPTL4; (-) strand; PAM type: NRG; PAM sequence: GAG
  source 1..20: mol_type = other DNA
cctctgcctcccaggttcaa

SEQ ID NO: 8392 - DNA, 20 bp, synthetic construct
  misc_feature 1..20: note = Description of Artificial Sequence: Synthetic oligonucleotide
  misc_feature 1..20: note = Target: ANGPTL4; (-) strand; PAM type: NRG; PAM sequence: AAG
  source 1..20: mol_type = other DNA
aacctctgcctcccaggttc

SEQ ID NO: 8393 - DNA, 20 bp, synthetic construct
  misc_feature 1..20: note = Description of Artificial Sequence: Synthetic oligonucleotide
  misc_feature 1..20: note = Target: ANGPTL4; (-) strand; PAM type: NRG; PAM sequence: AGG
  source 1..20: mol_type = other DNA
cactgcaacctctgcctccc

SEQ ID NO: 8394 - DNA, 20 bp, synthetic construct
  misc_feature 1..20: note = Description of Artificial Sequence: Synthetic oligonucleotide
  misc_feature 1..20: note = Target: ANGPTL4; (-) strand; PAM type: NRG; PAM sequence: CAG
  source 1..20: mol_type = other DNA
tcactgcaacctctgcctcc

SEQ ID NO: 8395 - DNA, 20 bp, synthetic construct
  misc_feature 1..20: note = Description of Artificial Sequence: Synthetic oligonucleotide
  misc_feature 1..20: note = Target: ANGPTL4; (-) strand; PAM type: NRG; PAM sequence: CAG
  source 1..20: mol_type = other DNA
ggagtgcggtggcgtcatct

SEQ ID NO: 8396 - DNA, 20 bp, synthetic construct
  misc_feature 1..20: note = Description of Artificial Sequence: Synthetic oligonucleotide
  misc_feature 1..20: note = Target: ANGPTL4; (-) strand; PAM type: NRG; PAM sequence: TGG
  source 1..20: mol_type = other DNA
tcgcccaggctggagtgcgg

SEQ ID NO: 8397 - DNA, 20 bp, synthetic construct
  misc_feature 1..20: note = Description of Artificial Sequence: Synthetic oligonucleotide
  misc_feature 1..20: note = Target: ANGPTL4; (-) strand; PAM type: NRG; PAM sequence: CGG
  source 1..20: mol_type = other DNA
ctgtcgcccaggctggagtg

SEQ ID NO: 8398 - DNA, 20 bp, synthetic construct
  misc_feature 1..20: note = Description of Artificial Sequence: Synthetic oligonucleotide
  misc_feature 1..20: note = Target: ANGPTL4; (-) strand; PAM type: NRG; PAM sequence: GAG
  source 1..20: mol_type = other DNA
tcgctctgtcgcccaggctg

SEQ ID NO: 8399 - DNA, 20 bp, synthetic construct
  misc_feature 1..20: note = Description of Artificial Sequence: Synthetic oligonucleotide
  misc_feature 1..20: note = Target: ANGPTL4; (-) strand; PAM type: NRG; PAM sequence: TGG
  source 1..20: mol_type = other DNA
tctcgctctgtcgcccaggc

SEQ ID NO: 8400 - DNA, 20 bp, synthetic construct
  misc_feature 1..20: note = Description of Artificial Sequence: Synthetic oligonucleotide
  misc_feature 1..20: note = Target: ANGPTL4; (-) strand; PAM type: NRG; PAM sequence: AGG
  source 1..20: mol_type = other DNA
ggagtctcgctctgtcgccc

SEQ ID NO: 8401 - DNA, 20 bp, synthetic construct
  misc_feature 1..20: note = Description of Artificial Sequence: Synthetic oligonucleotide
  misc_feature 1..20: note = Target: ANGPTL4; (-) strand; PAM type: NRG; PAM sequence: CAG
  source 1..20: mol_type = other DNA
cggagtctcgctctgtcgcc

SEQ ID NO: 8402 - DNA, 20 bp, synthetic construct
  misc_feature 1..20: note = Description of Artificial Sequence: Synthetic oligonucleotide
  misc_feature 1..20: note = Target: ANGPTL4; (-) strand; PAM type: NRG; PAM sequence: GAG
  source 1..20: mol_type = other DNA
atttttttgatggggggacg

SEQ ID NO: 8403 - DNA, 20 bp, synthetic construct
  misc_feature 1..20: note = Description of Artificial Sequence: Synthetic oligonucleotide
  misc_feature 1..20: note = Target: ANGPTL4; (-) strand; PAM type: NRG; PAM sequence: CGG
  source 1..20: mol_type = other DNA
ttatttttttgatgggggga

SEQ ID NO: 8404 - DNA, 20 bp, synthetic construct
  misc_feature 1..20: note = Description of Artificial Sequence: Synthetic oligonucleotide
  misc_feature 1..20: note = Target: ANGPTL4; (-) strand; PAM type: NRG; PAM sequence: GGG
  source 1..20: mol_type = other DNA
ttttttatttttttgatggg

SEQ ID NO: 8405 - DNA, 20 bp, synthetic construct
  misc_feature 1..20: note = Description of Artificial Sequence: Synthetic oligonucleotide
  misc_feature 1..20: note = Target: ANGPTL4; (-) strand; PAM type: NRG; PAM sequence: GGG
  source 1..20: mol_type = other DNA
cttttttatttttttgatgg

SEQ ID NO: 8406 - DNA, 20 bp, synthetic construct
  misc_feature 1..20: note = Description of Artificial Sequence: Synthetic oligonucleotide
  misc_feature 1..20: note = Target: ANGPTL4; (-) strand; PAM type: NRG; PAM sequence: GGG
  source 1..20: mol_type = other DNA
tcttttttatttttttgatg

SEQ ID NO: 8407 - DNA, 20 bp, synthetic construct
  misc_feature 1..20: note = Description of Artificial Sequence: Synthetic oligonucleotide
  misc_feature 1..20: note = Target: ANGPTL4; (-) strand; PAM type: NRG; PAM sequence: GGG
  source 1..20: mol_type = other DNA
ctcttttttatttttttgat

SEQ ID NO: 8408 - DNA, 20 bp, synthetic construct
  misc_feature 1..20: note = Description of Artificial Sequence: Synthetic oligonucleotide
  misc_feature 1..20: note = Target: ANGPTL4; (-) strand; PAM type: NRG; PAM sequence: TGG
  source 1..20: mol_type = other DNA
tctcttttttatttttttga

SEQ ID NO: 8409 - DNA, 20 bp, synthetic construct
  misc_feature 1..20: note = Description of Artificial Sequence: Synthetic oligonucleotide
  misc_feature 1..20: note = Target: ANGPTL4; (-) strand; PAM type: NRG; PAM sequence: GGG
  source 1..20: mol_type = other DNA
tgtgccaccatgcccagcaa

SEQ ID NO: 8410 - DNA, 20 bp, synthetic construct
  misc_feature 1..20: note = Description of Artificial Sequence: Synthetic oligonucleotide
  misc_feature 1..20: note = Target: ANGPTL4; (-) strand; PAM type: NRG; PAM sequence: AGG
  source 1..20: mol_type = other DNA
atgtgccaccatgcccagca

SEQ ID NO: 8411 - DNA, 20 bp, synthetic construct
  misc_feature 1..20: note = Description of Artificial Sequence: Synthetic oligonucleotide
  misc_feature 1..20: note = Target: ANGPTL4; (-) strand; PAM type: NRG; PAM sequence: AAG
  source 1..20: mol_type = other DNA
catgtgccaccatgcccagc

SEQ ID NO: 8412 - DNA, 20 bp, synthetic construct
  misc_feature 1..20: note = Description of Artificial Sequence: Synthetic oligonucleotide
  misc_feature 1..20: note = Target: ANGPTL4; (-) strand; PAM type: NRG; PAM sequence: CAG
  source 1..20: mol_type = other DNA
caggcatgtgccaccatgcc

SEQ ID NO: 8413 - DNA, 20 bp, synthetic construct
  misc_feature 1..20: note = Description of Artificial Sequence: Synthetic oligonucleotide
  misc_feature 1..20: note = Target: ANGPTL4; (-) strand; PAM type: NRG; PAM sequence: AGG
  source 1..20: mol_type = other DNA
tcccgagtagctgggactac

SEQ ID NO: 8414 - DNA, 20 bp, synthetic construct
  misc_feature 1..20: note = Description of Artificial Sequence: Synthetic oligonucleotide
  misc_feature 1..20: note = Target: ANGPTL4; (-) strand; PAM type: NRG; PAM sequence: CAG
  source 1..20: mol_type = other DNA
ctcccgagtagctgggacta

SEQ ID NO: 8415 - DNA, 20 bp, synthetic construct
  misc_feature 1..20: note = Description of Artificial Sequence: Synthetic oligonucleotide
  misc_feature 1..20: note = Target: ANGPTL4; (-) strand; PAM type: NRG; PAM sequence: GGG
  source 1..20: mol_type = other DNA
ccttggcctcccgagtagct

SEQ ID NO: 8416 - DNA, 20 bp, synthetic construct
  misc_feature 1..20: note = Description of Artificial Sequence: Synthetic oligonucleotide
  misc_feature 1..20: note = Target: ANGPTL4; (-) strand; PAM type: NRG; PAM sequence: TGG
  source 1..20: mol_type = other DNA
gccttggcctcccgagtagc

SEQ ID NO: 8417 - DNA, 20 bp, synthetic construct
  misc_feature 1..20: note = Description of Artificial Sequence: Synthetic oligonucleotide
  misc_feature 1..20: note = Target: ANGPTL4; (-) strand; PAM type: NRG; PAM sequence: TAG
  source 1..20: mol_type = other DNA
tcctgccttggcctcccgag

SEQ ID NO: 8418 - DNA, 20 bp, synthetic construct
  misc_feature 1..20: note = Description of Artificial Sequence: Synthetic oligonucleotide
  misc_feature 1..20: note = Target: ANGPTL4; (-) strand; PAM type: NRG; PAM sequence: GAG
  source 1..20: mol_type = other DNA
ccctcctgccttggcctccc

SEQ ID NO: 8419 - DNA, 20 bp, synthetic construct
  misc_feature 1..20: note = Description of Artificial Sequence: Synthetic oligonucleotide
  misc_feature 1..20: note = Target: ANGPTL4; (-) strand; PAM type: NRG; PAM sequence: TGG
  source 1..20: mol_type = other DNA
ctgaagtgaccctcctgcct

SEQ ID NO: 8420 - DNA, 20 bp, synthetic construct
  misc_feature 1..20: note = Description of Artificial Sequence: Synthetic oligonucleotide
  misc_feature 1..20: note = Target: ANGPTL4; (-) strand; PAM type: NRG; PAM sequence: AAG
  source 1..20: mol_type = other DNA
agcctttaactcctgggctg

SEQ ID NO: 8421 - DNA, 20 bp, synthetic construct
  misc_feature 1..20: note = Description of Artificial Sequence: Synthetic oligonucleotide
  misc_feature 1..20: note = Target: ANGPTL4; (-) strand; PAM type: NRG; PAM sequence: GGG
  source 1..20: mol_type = other DNA
cacggcagcctttaactcct

SEQ ID NO: 8422 - DNA, 20 bp, synthetic construct
  misc_feature 1..20: note = Description of Artificial Sequence: Synthetic oligonucleotide
  misc_feature 1..20: note = Target: ANGPTL4; (-) strand; PAM type: NRG; PAM sequence: TGG
  source 1..20: mol_type = other DNA
tcacggcagcctttaactcc

SEQ ID NO: 8423 - DNA, 20 bp, synthetic construct
  misc_feature 1..20: note = Description of Artificial Sequence: Synthetic oligonucleotide
  misc_feature 1..20: note = Target: ANGPTL4; (-) strand; PAM type: NRG; PAM sequence: CAG
  source 1..20: mol_type = other DNA
ggtgtgatcacggctcacgg

SEQ ID NO: 8424 - DNA, 20 bp, synthetic construct
  misc_feature 1..20: note = Description of Artificial Sequence: Synthetic oligonucleotide
  misc_feature 1..20: note = Target: ANGPTL4; (-) strand; PAM type: NRG; PAM sequence: CGG
  source 1..20: mol_type = other DNA
acaggtgtgatcacggctca

SEQ ID NO: 8425 - DNA, 20 bp, synthetic construct
  misc_feature 1..20: note = Description of Artificial Sequence: Synthetic oligonucleotide
  misc_feature 1..20: note = Target: ANGPTL4; (-) strand; PAM type: NRG; PAM sequence: CGG
  source 1..20: mol_type = other DNA
gctattcacaggtgtgatca

SEQ ID NO: 8426 - DNA, 20 bp, synthetic construct
  misc_feature 1..20: note = Description of Artificial Sequence: Synthetic oligonucleotide
  misc_feature 1..20: note = Target: ANGPTL4; (-) strand; PAM type: NRG; PAM sequence: AGG
  source 1..20: mol_type = other DNA
ggagtgcggtggctattcac

SEQ ID NO: 8427 - DNA, 20 bp, synthetic construct
  misc_feature 1..20: note = Description of Artificial Sequence: Synthetic oligonucleotide
  misc_feature 1..20: note = Target: ANGPTL4; (-) strand; PAM type: NRG; PAM sequence: CAG
  source 1..20: mol_type = other DNA
tggagtgcggtggctattca

SEQ ID NO: 8428 - DNA, 20 bp, synthetic construct
  misc_feature 1..20: note = Description of Artificial Sequence: Synthetic oligonucleotide
  misc_feature 1..20: note = Target: ANGPTL4; (-) strand; PAM type: NRG; PAM sequence: TGG
  source 1..20: mol_type = other DNA
ttgcccaggttggagtgcgg

SEQ ID NO: 8429 - DNA, 20 bp, synthetic construct
  misc_feature 1..20: note = Description of Artificial Sequence: Synthetic oligonucleotide
  misc_feature 1..20: note = Target: ANGPTL4; (-) strand; PAM type: NRG; PAM sequence: CGG
  source 1..20: mol_type = other DNA
gtgttgcccaggttggagtg

SEQ ID NO: 8430 - DNA, 20 bp, synthetic construct
  misc_feature 1..20: note = Description of Artificial Sequence: Synthetic oligonucleotide
  misc_feature 1..20: note = Target: ANGPTL4; (-) strand; PAM type: NRG; PAM sequence: GAG
  source 1..20: mol_type = other DNA
ttgttgtgttgcccaggttg

SEQ ID NO: 8431 - DNA, 20 bp, synthetic construct
  misc_feature 1..20: note = Description of Artificial Sequence: Synthetic oligonucleotide
  misc_feature 1..20: note = Target: ANGPTL4; (-) strand; PAM type: NRG; PAM sequence: TGG
  source 1..20: mol_type = other DNA
ttttgttgtgttgcccaggt

SEQ ID NO: 8432 - DNA, 20 bp, synthetic construct
  misc_feature 1..20: note = Description of Artificial Sequence: Synthetic oligonucleotide
  misc_feature 1..20: note = Target: ANGPTL4; (-) strand; PAM type: NRG; PAM sequence: AGG
  source 1..20: mol_type = other DNA
gaggttttgttgtgttgccc

SEQ ID NO: 8433 - DNA, 20 bp, synthetic construct
  misc_feature 1..20: note = Description of Artificial Sequence: Synthetic oligonucleotide
  misc_feature 1..20: note = Target: ANGPTL4; (-) strand; PAM type: NRG; PAM sequence: CAG
  source 1..20: mol_type = other DNA
cgaggttttgttgtgttgcc

SEQ ID NO: 8434 - DNA, 20 bp, synthetic construct
  misc_feature 1..20: note = Description of Artificial Sequence: Synthetic oligonucleotide
  misc_feature 1..20: note = Target: ANGPTL4; (-) strand; PAM type: NRG; PAM sequence: AGG
  source 1..20: mol_type = other DNA
tttgtttttttttagaaacg

SEQ ID NO: 8435 - DNA, 20 bp, synthetic construct
  misc_feature 1..20: note = Description of Artificial Sequence: Synthetic oligonucleotide
  misc_feature 1..20: note = Target: ANGPTL4; (-) strand; PAM type: NRG; PAM sequence: GAG
  source 1..20: mol_type = other DNA
ctttgtttttttttagaaac

SEQ ID NO: 8436 - DNA, 20 bp, synthetic construct
  misc_feature 1..20: note = Description of Artificial Sequence: Synthetic oligonucleotide
  misc_feature 1..20: note = Target: ANGPTL4; (-) strand; PAM type: NRG; PAM sequence: TAG
  source 1..20: mol_type = other DNA
gctcagcctttgtttttttt

SEQ ID NO: 8437 - DNA, 20 bp, synthetic construct
  misc_feature 1..20: note = Description of Artificial Sequence: Synthetic oligonucleotide
  misc_feature 1..20: note = Target: ANGPTL4; (-) strand; PAM type: NRG; PAM sequence: CAG
  source 1..20: mol_type = other DNA
caggtgtaagccaccgtgct

SEQ ID NO: 8438 - DNA, 20 bp, synthetic construct
  misc_feature 1..20: note = Description of Artificial Sequence: Synthetic oligonucleotide
  misc_feature 1..20: note = Target: ANGPTL4; (-) strand; PAM type: NRG; PAM sequence: AAG
  source 1..20: mol_type = other DNA
agtgctggcatttcaggtgt

SEQ ID NO: 8439 - DNA, 20 bp, synthetic construct
  misc_feature 1..20: note = Description of Artificial Sequence: Synthetic oligonucleotide
  misc_feature 1..20: note = Target: ANGPTL4; (-) strand; PAM type: NRG; PAM sequence: AGG
  source 1..20: mol_type = other DNA
tcccaaagtgctggcatttc

SEQ ID NO: 8440 - DNA, 20 bp, synthetic construct
  misc_feature 1..20: note = Description of Artificial Sequence: Synthetic oligonucleotide
  misc_feature 1..20: note = Target: ANGPTL4; (-) strand; PAM type: NRG; PAM sequence: CAG
  source 1..20: mol_type = other DNA
ctcccaaagtgctggcattt

SEQ ID NO: 8441 - DNA, 20 bp, synthetic construct
  misc_feature 1..20: note = Description of Artificial Sequence: Synthetic oligonucleotide
  misc_feature 1..20: note = Target: ANGPTL4; (-) strand; PAM type: NRG; PAM sequence: TGG
  source 1..20: mol_type = other DNA
gcctcagcctcccaaagtgc

SEQ ID NO: 8442 - DNA, 20 bp, synthetic construct
  misc_feature 1..20: note = Description of Artificial Sequence: Synthetic oligonucleotide
  misc_feature 1..20: note = Target: ANGPTL4; (-) strand; PAM type: NRG; PAM sequence: AAG
  source 1..20: mol_type = other DNA
ttgcccgcctcagcctccca

SEQ ID NO: 8443 - DNA, 20 bp, synthetic construct
  misc_feature 1..20: note = Description of Artificial Sequence: Synthetic oligonucleotide
  misc_feature 1..20: note = Target: ANGPTL4; (-) strand; PAM type: NRG; PAM sequence: CAG
  source 1..20: mol_type = other DNA
ctcaagtgatttgcccgcct

SEQ ID NO: 8444 - DNA, 20 bp, synthetic construct
  misc_feature 1..20: note = Description of Artificial Sequence: Synthetic oligonucleotide
  misc_feature 1..20: note = Target: ANGPTL4; (-) strand; PAM type: NRG; PAM sequence: AAG
  source 1..20: mol_type = other DNA
ggtcttgaacttctgacctc

SEQ ID NO: 8445 - DNA, 20 bp, synthetic construct
  misc_feature 1..20: note = Description of Artificial Sequence: Synthetic oligonucleotide
  misc_feature 1..20: note = Target: ANGPTL4; (-) strand; PAM type: NRG; PAM sequence: TGG
  source 1..20: mol_type = other DNA
tttcaccatgttggccaggc

SEQ ID NO: 8446 - DNA, 20 bp, synthetic construct
  misc_feature 1..20: note = Description of Artificial Sequence: Synthetic oligonucleotide
  misc_feature 1..20: note = Target: ANGPTL4; (-) strand; PAM type: NRG; PAM sequence: AGG
  source 1..20: mol_type = other DNA
agggtttcaccatgttggcc

SEQ ID NO: 8447 - DNA, 20 bp, synthetic construct
  misc_feature 1..20: note = Description of Artificial Sequence: Synthetic oligonucleotide
  misc_feature 1..20: note = Target: ANGPTL4; (-) strand; PAM type: NRG; PAM sequence: CAG
  source 1..20: mol_type = other DNA
tagggtttcaccatgttggc

SEQ ID NO: 8448 - DNA, 20 bp, synthetic construct
  misc_feature 1..20: note = Description of Artificial Sequence: Synthetic oligonucleotide
  misc_feature 1..20: note = Target: ANGPTL4; (-) strand; PAM type: NRG; PAM sequence: TGG
  source 1..20: mol_type = other DNA
gagatagggtttcaccatgt

SEQ ID NO: 8449 - DNA, 20 bp, synthetic construct
  misc_feature 1..20: note = Description of Artificial Sequence: Synthetic oligonucleotide
  misc_feature 1..20: note = Target: ANGPTL4; (-) strand; PAM type: NRG; PAM sequence: GGG
  source 1..20: mol_type = other DNA
tgtttatgttggtagagata

SEQ ID NO: 8450 - DNA, 20 bp, synthetic construct
  misc_feature 1..20: note = Description of Artificial Sequence: Synthetic oligonucleotide
  misc_feature 1..20: note = Target: ANGPTL4; (-) strand; PAM type: NRG; PAM sequence: AGG
  source 1..20: mol_type = other DNA
atgtttatgttggtagagat

SEQ ID NO: 8451 - DNA, 20 bp, synthetic construct
  misc_feature 1..20: note = Description of Artificial Sequence: Synthetic oligonucleotide
  misc_feature 1..20: note = Target: ANGPTL4; (-) strand; PAM type: NRG; PAM sequence: TAG
  source 1..20: mol_type = other DNA
aatgtttatgttggtagaga

SEQ ID NO: 8452 - DNA, 20 bp, synthetic construct
  misc_feature 1..20: note = Description of Artificial Sequence: Synthetic oligonucleotide
  misc_feature 1..20: note = Target: ANGPTL4; (-) strand; PAM type: NRG; PAM sequence: GAG
  source 1..20: mol_type = other DNA
ggctaatgtttatgttggta

SEQ ID NO: 8453 - DNA, 20 bp, synthetic construct
  misc_feature 1..20: note = Description of Artificial Sequence: Synthetic oligonucleotide
  misc_feature 1..20: note = Target: ANGPTL4; (-) strand; PAM type: NRG; PAM sequence: TAG
  source 1..20: mol_type = other DNA
ccggctaatgtttatgttgg

SEQ ID NO: 8454 - DNA, 20 bp, synthetic construct
  misc_feature 1..20: note = Description of Artificial Sequence: Synthetic oligonucleotide
  misc_feature 1..20: note = Target: ANGPTL4; (-) strand; PAM type: NRG; PAM sequence: TGG
  source 1..20: mol_type = other DNA
cgcccggctaatgtttatgt

SEQ ID NO: 8455 - DNA, 20 bp, synthetic construct
  misc_feature 1..20: note = Description of Artificial Sequence: Synthetic oligonucleotide
  misc_feature 1..20: note = Target: ANGPTL4; (-) strand; PAM type: NRG; PAM sequence: CGG
  source 1..20: mol_type = other DNA
gctggaatcacaggcacgcc

SEQ ID NO: 8456 - DNA, 20 bp, synthetic construct
  misc_feature 1..20: note = Description of Artificial Sequence: Synthetic oligonucleotide
  misc_feature 1..20: note = Target: ANGPTL4; (-) strand; PAM type: NRG; PAM sequence: AGG
  source 1..20: mol_type = other DNA
ccacaagcagctggaatcac

SEQ ID NO: 8457 - DNA, 20 bp, synthetic construct
  misc_feature 1..20: note = Description of Artificial Sequence: Synthetic oligonucleotide
  misc_feature 1..20: note = Target: ANGPTL4; (-) strand; PAM type: NRG; PAM sequence: CAG
  source 1..20: mol_type = other DNA
cccacaagcagctggaatca

SEQ ID NO: 8458 - DNA, 20 bp, synthetic construct
  misc_feature 1..20: note = Description of Artificial Sequence: Synthetic oligonucleotide
  misc_feature 1..20: note = Target: ANGPTL4; (-) strand; PAM type: NRG; PAM sequence: TGG
  source 1..20: mol_type = other DNA
gcttcagccccacaagcagc

SEQ ID NO: 8459 - DNA, 20 bp, synthetic construct
  misc_feature 1..20: note = Description of Artificial Sequence: Synthetic oligonucleotide
  misc_feature 1..20: note = Target: ANGPTL4; (-) strand; PAM type: NRG; PAM sequence: CAG
  source 1..20: mol_type = other DNA
ttgtgcttcagccccacaag

SEQ ID NO: 8460 - DNA, 20 bp, synthetic construct
  misc_feature 1..20: note = Description of Artificial Sequence: Synthetic oligonucleotide
  misc_feature 1..20: note = Target: ANGPTL4; (-) strand; PAM type: NRG; PAM sequence: AAG
  source 1..20: mol_type = other DNA
ttcttgtgcttcagccccac

SEQ ID NO: 8461 - DNA, 20 bp, synthetic construct
  misc_feature 1..20: note = Description of Artificial Sequence: Synthetic oligonucleotide
  misc_feature 1..20: note = Target: ANGPTL4; (-) strand; PAM type: NRG; PAM sequence: CAG
  source 1..20: mol_type = other DNA
ctcaagcgattcttgtgctt

SEQ ID NO: 8462 - DNA, 20 bp, synthetic construct
  misc_feature 1..20: note = Description of Artificial Sequence: Synthetic oligonucleotide
  misc_feature 1..20: note = Target: ANGPTL4; (-) strand; PAM type: NRG; PAM sequence: AAG
  source 1..20: mol_type = other DNA
aacctctgccttcggggctc

SEQ ID NO: 8463 - DNA, 20 bp, synthetic construct
  misc_feature 1..20: note = Description of Artificial Sequence: Synthetic oligonucleotide
  misc_feature 1..20: note = Target: ANGPTL4; (-) strand; PAM type: NRG; PAM sequence: GGG
  source 1..20: mol_type = other DNA
cactgcaacctctgccttcg

SEQ ID NO: 8464 - DNA, 20 bp, synthetic construct
  misc_feature 1..20: note = Description of Artificial Sequence: Synthetic oligonucleotide
  misc_feature 1..20: note = Target: ANGPTL4; (-) strand; PAM type: NRG; PAM sequence: GGG
  source 1..20: mol_type = other DNA
tcactgcaacctctgccttc

SEQ ID NO: 8465 - DNA, 20 bp, synthetic construct
  misc_feature 1..20: note = Description of Artificial Sequence: Synthetic oligonucleotide
  misc_feature 1..20: note = Target: ANGPTL4; (-) strand; PAM type: NRG; PAM sequence: CGG
  source 1..20: mol_type = other DNA
ctcactgcaacctctgcctt

SEQ ID NO: 8466 - DNA, 20 bp, synthetic construct
  misc_feature 1..20: note = Description of Artificial Sequence: Synthetic oligonucleotide
  misc_feature 1..20: note = Target: ANGPTL4; (-) strand; PAM type: NRG; PAM sequence: CAG
  source 1..20: mol_type = other DNA
ggatcgcagtgccgcaatct

SEQ ID NO: 8467 - DNA, 20 bp, synthetic construct
  misc_feature 1..20: note = Description of Artificial Sequence: Synthetic oligonucleotide
  misc_feature 1..20: note = Target: ANGPTL4; (-) strand; PAM type: NRG; PAM sequence: CAG
  source 1..20: mol_type = other DNA
ctgttgcccaggctggatcg

SEQ ID NO: 8468 - DNA, 20 bp, synthetic construct
  misc_feature 1..20: note = Description of Artificial Sequence: Synthetic oligonucleotide
  misc_feature 1..20: note = Target: ANGPTL4; (-) strand; PAM type: NRG; PAM sequence: TGG
  source 1..20: mol_type = other DNA
tctcactctgttgcccaggc

SEQ ID NO: 8469 - DNA, 20 bp, synthetic construct
  misc_feature 1..20: note = Description of Artificial Sequence: Synthetic oligonucleotide
  misc_feature 1..20: note = Target: ANGPTL4; (-) strand; PAM type: NRG; PAM sequence: AGG
  source 1..20: mol_type = other DNA
ggagtctcactctgttgccc

SEQ ID NO: 8470 - DNA, 20 bp, synthetic construct
  misc_feature 1..20: note = Description of Artificial Sequence: Synthetic oligonucleotide
  misc_feature 1..20: note = Target: ANGPTL4; (-) strand; PAM type: NRG; PAM sequence: CAG
  source 1..20: mol_type = other DNA
tggagtctcactctgttgcc

SEQ ID NO: 8471 - DNA, 20 bp, synthetic construct
  misc_feature 1..20: note = Description of Artificial Sequence: Synthetic oligonucleotide
  misc_feature 1..20: note = Target: ANGPTL4; (-) strand; PAM type: NRG; PAM sequence: GAG
  source 1..20: mol_type = other DNA
tttttttttttttagagatg

SEQ ID NO: 8472 - DNA, 20 bp, synthetic construct
  misc_feature 1..20: note = Description of Artificial Sequence: Synthetic oligonucleotide
  misc_feature 1..20: note = Target: ANGPTL4; (-) strand; PAM type: NRG; PAM sequence: TGG
  source 1..20: mol_type = other DNA
tttttttttttttttagaga

SEQ ID NO: 8473 - DNA, 20 bp, synthetic construct
  misc_feature 1..20: note = Description of Artificial Sequence: Synthetic oligonucleotide
  misc_feature 1..20: note = Target: ANGPTL4; (-) strand; PAM type: NRG; PAM sequence: GAG
  source 1..20: mol_type = other DNA
ttttttttttttttttttta

SEQ ID NO: 8474 - DNA, 20 bp, synthetic construct
  misc_feature 1..20: note = Description of Artificial Sequence: Synthetic oligonucleotide
  misc_feature 1..20: note = Target: ANGPTL4; (-) strand; PAM type: NRG; PAM sequence: TAG
  source 1..20: mol_type = other DNA
tttttttttttttttttttt

SEQ ID NO: 8475 - DNA, 20 bp, synthetic construct
  misc_feature 1..20: note = Description of Artificial Sequence: Synthetic oligonucleotide
  misc_feature 1..20: note = Target: ANGPTL4; (-) strand; PAM type: NRG; PAM sequence: AAG
  source 1..20: mol_type = other DNA
ggacttctcagtggaaaaaa

SEQ ID NO: 8476 - DNA, 20 bp, synthetic construct
  misc_feature 1..20: note = Description of Artificial Sequence: Synthetic oligonucleotide
  misc_feature 1..20: note = Target: ANGPTL4; (-) strand; PAM type: NRG; PAM sequence: TGG
  source 1..20: mol_type = other DNA
taatggaaaggacttctcag

SEQ ID NO: 8477 - DNA, 20 bp, synthetic construct
  misc_feature 1..20: note = Description of Artificial Sequence: Synthetic oligonucleotide
  misc_feature 1..20: note = Target: ANGPTL4; (-) strand; PAM type: NRG; PAM sequence: CAG
  source 1..20: mol_type = other DNA
ttgtaatggaaaggacttct

SEQ ID NO: 8478 - DNA, 20 bp, synthetic construct
  misc_feature 1..20: note = Description of Artificial Sequence: Synthetic oligonucleotide
  misc_feature 1..20: note = Target: ANGPTL4; (-) strand; PAM type: NRG; PAM sequence: AGG
  source 1..20: mol_type = other DNA
tgtaacctcttgtaatggaa

SEQ ID NO: 8479 - DNA, 20 bp, synthetic construct
  misc_feature 1..20: note = Description of Artificial Sequence: Synthetic oligonucleotide
  misc_feature 1..20: note = Target: ANGPTL4; (-) strand; PAM type: NRG; PAM sequence: AAG
  source 1..20: mol_type = other DNA
ttgtaacctcttgtaatgga

SEQ ID NO: 8480 - DNA, 20 bp, synthetic construct
  misc_feature 1..20: note = Description of Artificial Sequence: Synthetic oligonucleotide
  misc_feature 1..20: note = Target: ANGPTL4; (-) strand; PAM type: NRG; PAM sequence: TGG
  source 1..20: mol_type = other DNA
cgtgttgtaacctcttgtaa

SEQ ID NO: 8481 - DNA, 20 bp, synthetic construct
  misc_feature 1..20: note = Description of Artificial Sequence: Synthetic oligonucleotide
  misc_feature 1..20: note = Target: ANGPTL4; (-) strand; PAM type: NRG; PAM sequence: GGG
  source 1..20: mol_type = other DNA
ctctctgggccagctgaact

SEQ ID NO: 8482 - DNA, 20 bp, synthetic construct
  misc_feature 1..20: note = Description of Artificial Sequence: Synthetic oligonucleotide
  misc_feature 1..20: note = Target: ANGPTL4; (-) strand; PAM type: NRG; PAM sequence: TGG
  source 1..20: mol_type = other DNA
cctctctgggccagctgaac

SEQ ID NO: 8483 - DNA, 20 bp, synthetic construct
  misc_feature 1..20: note = Description of Artificial Sequence: Synthetic oligonucleotide
  misc_feature 1..20: note = Target: ANGPTL4; (-) strand; PAM type: NRG; PAM sequence: CAG
  source 1..20: mol_type = other DNA
tctgcaaagcctctctgggc

SEQ ID NO: 8484 - DNA, 20 bp, synthetic construct
  misc_feature 1..20: note = Description of Artificial Sequence: Synthetic oligonucleotide
  misc_feature 1..20: note = Target: ANGPTL4; (-) strand; PAM type: NRG; PAM sequence: GGG
  source 1..20: mol_type = other DNA
gaaatctgcaaagcctctct

SEQ ID NO: 8485 - DNA, 20 bp, synthetic construct
  misc_feature 1..20: note = Description of Artificial Sequence: Synthetic oligonucleotide
  misc_feature 1..20: note = Target: ANGPTL4; (-) strand; PAM type: NRG; PAM sequence: TGG
  source 1..20: mol_type = other DNA
ggaaatctgcaaagcctctc

SEQ ID NO: 8486 - DNA, 20 bp, synthetic construct
  misc_feature 1..20: note = Description of Artificial Sequence: Synthetic oligonucleotide
  misc_feature 1..20: note = Target: ANGPTL4; (-) strand; PAM type: NRG; PAM sequence: AAG
  source 1..20: mol_type = other DNA
gtaggcagtggaaatctgca

SEQ ID NO: 8487 - DNA, 20 bp, synthetic construct
  misc_feature 1..20: note = Description of Artificial Sequence: Synthetic oligonucleotide
  misc_feature 1..20: note = Target: ANGPTL4; (-) strand; PAM type: NRG; PAM sequence: TGG
  source 1..20: mol_type = other DNA
gtgtgggagggagtaggcag

SEQ ID NO: 8488 - DNA, 20 bp, synthetic construct
  misc_feature 1..20: note = Description of Artificial Sequence: Synthetic oligonucleotide
  misc_feature 1..20: note = Target: ANGPTL4; (-) strand; PAM type: NRG; PAM sequence: CAG
  source 1..20: mol_type = other DNA
tgagtgtgggagggagtagg

SEQ ID NO: 8489 - DNA, 20 bp, synthetic construct
  misc_feature 1..20: note = Description of Artificial Sequence: Synthetic oligonucleotide
  misc_feature 1..20: note = Target: ANGPTL4; (-) strand; PAM type: NRG; PAM sequence: AGG
  source 1..20: mol_type = other DNA
gactgagtgtgggagggagt

SEQ ID NO: 8490 - DNA, 20 bp, synthetic construct
  misc_feature 1..20: note = Description of Artificial Sequence: Synthetic oligonucleotide
  misc_feature 1..20: note = Target: ANGPTL4; (-) strand; PAM type: NRG; PAM sequence: TAG
  source 1..20: mol_type = other DNA
ggactgagtgtgggagggag

SEQ ID NO: 8491 - DNA, 20 bp, synthetic construct
  misc_feature 1..20: note = Description of Artificial Sequence: Synthetic oligonucleotide
  misc_feature 1..20: note = Target: ANGPTL4; (-) strand; PAM type: NRG; PAM sequence: GAG
  source 1..20: mol_type = other DNA
cagggactgagtgtgggagg

SEQ ID NO: 8492 - DNA, 20 bp, synthetic construct
  misc_feature 1..20: note = Description of Artificial Sequence: Synthetic oligonucleotide
  misc_feature 1..20: note = Target: ANGPTL4; (-) strand; PAM type: NRG; PAM sequence: GGG
  source 1..20: mol_type = other DNA
agcagggactgagtgtggga

SEQ ID NO: 8493 - DNA, 20 bp, synthetic construct
  misc_feature 1..20: note = Description of Artificial Sequence: Synthetic oligonucleotide
  misc_feature 1..20: note = Target: ANGPTL4; (-) strand; PAM type: NRG; PAM sequence: AGG
  source 1..20: mol_type = other DNA
cagcagggactgagtgtggg

SEQ ID NO: 8494 - DNA, 20 bp, synthetic construct
  misc_feature 1..20: note = Description of Artificial Sequence: Synthetic oligonucleotide
  misc_feature 1..20: note = Target: ANGPTL4; (-) strand; PAM type: NRG; PAM sequence: GAG
  source 1..20: mol_type = other DNA
ccagcagggactgagtgtgg

SEQ ID NO: 8495 - DNA, 20 bp, synthetic construct
  misc_feature 1..20: note = Description of Artificial Sequence: Synthetic oligonucleotide
  misc_feature 1..20: note = Target: ANGPTL4; (-) strand; PAM type: NRG; PAM sequence: GGG
  source 1..20: mol_type = other DNA
acccagcagggactgagtgt

SEQ ID NO: 8496 - DNA, 20 bp, synthetic construct
  misc_feature 1..20: note = Description of Artificial Sequence: Synthetic oligonucleotide
  misc_feature 1..20: note = Target: ANGPTL4; (-) strand; PAM type: NRG; PAM sequence: TGG
  source 1..20: mol_type = other DNA
aacccagcagggactgagtg

SEQ ID NO: 8497 - DNA, 20 bp, synthetic construct
  misc_feature 1..20: note = Description of Artificial Sequence: Synthetic oligonucleotide
  misc_feature 1..20: note = Target: ANGPTL4; (-) strand; PAM type: NRG; PAM sequence: GAG
  source 1..20: mol_type = other DNA
ccaagaacccagcagggact

SEQ ID NO: 8498 - DNA, 20 bp, synthetic construct
  misc_feature 1..20: note = Description of Artificial Sequence: Synthetic oligonucleotide
  misc_feature 1..20: note = Target: ANGPTL4; (-) strand; PAM type: NRG; PAM sequence: GGG
  source 1..20: mol_type = other DNA
tttgtcccaagaacccagca

SEQ ID NO: 8499 - DNA, 20 bp, synthetic construct
  misc_feature 1..20: note = Description of Artificial Sequence: Synthetic oligonucleotide
  misc_feature 1..20: note = Target: ANGPTL4; (-) strand; PAM type: NRG; PAM sequence: AGG
  source 1..20: mol_type = other DNA
ctttgtcccaagaacccagc

SEQ ID NO: 8500 - DNA, 20 bp, synthetic construct
  misc_feature 1..20: note = Description of Artificial Sequence: Synthetic oligonucleotide
  misc_feature 1..20: note = Target: ANGPTL4; (-) strand; PAM type: NRG; PAM sequence: CAG
  source 1..20: mol_type = other DNA
tctttgtcccaagaacccag

SEQ ID NO: 8501 - DNA, 20 bp, synthetic construct
  misc_feature 1..20: note = Description of Artificial Sequence: Synthetic oligonucleotide
  misc_feature 1..20: note = Target: ANGPTL4; (-) strand; PAM type: NRG; PAM sequence: CAG
  source 1..20: mol_type = other DNA
agatctttgtcccaagaacc

SEQ ID NO: 8502 - DNA, 20 bp, synthetic construct
  misc_feature 1..20: note = Description of Artificial Sequence: Synthetic oligonucleotide
  misc_feature 1..20: note = Target: ANGPTL4; (-) strand; PAM type: NRG; PAM sequence: AAG
  source 1..20: mol_type = other DNA
cttgggaagatctttgtccc

SEQ ID NO: 8503 - DNA, 20 bp, synthetic construct
  misc_feature 1..20: note = Description of Artificial Sequence: Synthetic oligonucleotide
  misc_feature 1..20: note = Target: ANGPTL4; (-) strand; PAM type: NRG; PAM sequence: AAG
  source 1..20: mol_type = other DNA
tattatgggctggccttggg

SEQ ID NO: 8504 - DNA, 20 bp, synthetic construct
  misc_feature 1..20: note = Description of Artificial Sequence: Synthetic oligonucleotide
  misc_feature 1..20: note = Target: ANGPTL4; (-) strand; PAM type: NRG; PAM sequence: GGG
  source 1..20: mol_type = other DNA
gaatattatgggctggcctt

SEQ ID NO: 8505 - DNA, 20 bp, synthetic construct
  misc_feature 1..20: note = Description of Artificial Sequence: Synthetic oligonucleotide
  misc_feature 1..20: note = Target: ANGPTL4; (-) strand; PAM type: NRG; PAM sequence: TGG
  source 1..20: mol_type = other DNA
ggaatattatgggctggcct

SEQ ID NO: 8506 - DNA, 20 bp, synthetic construct
  misc_feature 1..20: note = Description of Artificial Sequence: Synthetic oligonucleotide
  misc_feature 1..20: note = Target: ANGPTL4; (-) strand; PAM type: NRG; PAM sequence: TGG
  source 1..20: mol_type = other DNA
gagggaggaatattatgggc

SEQ ID NO: 8507 - DNA, 20 bp, synthetic construct
  misc_feature 1..20: note = Description of Artificial Sequence: Synthetic oligonucleotide
  misc_feature 1..20: note = Target: ANGPTL4; (-) strand; PAM type: NRG; PAM sequence: GGG
  source 1..20: mol_type = other DNA
gtcagagggaggaatattat

SEQ ID NO: 8508 - DNA, 20 bp, synthetic construct
  misc_feature 1..20: note = Description of Artificial Sequence: Synthetic oligonucleotide
  misc_feature 1..20: note = Target: ANGPTL4; (-) strand; PAM type: NRG; PAM sequence: TGG
  source 1..20: mol_type = other DNA
ggtcagagggaggaatatta

SEQ ID NO: 8509 - DNA, 20 bp, synthetic construct
  misc_feature 1..20: note = Description of Artificial Sequence: Synthetic oligonucleotide
  misc_feature 1..20: note = Target: ANGPTL4; (-) strand; PAM type: NRG; PAM sequence: AGG
  source 1..20: mol_type = other DNA
gaggagggtgggtcagaggg

SEQ ID NO: 8510 - DNA, 20 bp, synthetic construct
  misc_feature 1..20: note = Description of Artificial Sequence: Synthetic oligonucleotide
  misc_feature 1..20: note = Target: ANGPTL4; (-) strand; PAM type: NRG; PAM sequence: GAG
  source 1..20: mol_type = other DNA
cgaggagggtgggtcagagg

SEQ ID NO: 8511 - DNA, 20 bp, synthetic construct
  misc_feature 1..20: note = Description of Artificial Sequence: Synthetic oligonucleotide
  misc_feature 1..20: note = Target: ANGPTL4; (-) strand; PAM type: NRG; PAM sequence: GGG
  source 1..20: mol_type = other DNA
ctcgaggagggtgggtcaga

SEQ ID NO: 8512 - DNA, 20 bp, synthetic construct
  misc_feature 1..20: note = Description of Artificial Sequence: Synthetic oligonucleotide
  misc_feature 1..20: note = Target: ANGPTL4; (-) strand; PAM type: NRG; PAM sequence: AGG
  source 1..20: mol_type = other DNA
actcgaggagggtgggtcag

SEQ ID NO: 8513 - DNA, 20 bp, synthetic construct
  misc_feature 1..20: note = Description of Artificial Sequence: Synthetic oligonucleotide
  misc_feature 1..20: note = Target: ANGPTL4; (-) strand; PAM type: NRG; PAM sequence: GAG
  source 1..20: mol_type = other DNA
gactcgaggagggtgggtca

SEQ ID NO: 8514 - DNA, 20 bp, synthetic construct
  misc_feature 1..20: note = Description of Artificial Sequence: Synthetic oligonucleotide
  misc_feature 1..20: note = Target: ANGPTL4; (-) strand; PAM type: NRG; PAM sequence: CAG
  source 1..20: mol_type = other DNA
aggactcgaggagggtgggt

SEQ ID NO: 8515 - DNA, 20 bp, synthetic construct
  misc_feature 1..20: note = Description of Artificial Sequence: Synthetic oligonucleotide
  misc_feature 1..20: note = Target: ANGPTL4; (-) strand; PAM type: NRG; PAM sequence: GGG
  source 1..20: mol_type = other DNA
ctggaggactcgaggagggt

SEQ ID NO: 8516 - DNA, 20 bp, synthetic construct
  misc_feature 1..20: note = Description of Artificial Sequence: Synthetic oligonucleotide
  misc_feature 1..20: note = Target: ANGPTL4; (-) strand; PAM type: NRG; PAM sequence: TGG
  source 1..20: mol_type = other DNA
cctggaggactcgaggaggg

SEQ ID NO: 8517 - DNA, 20 bp, synthetic construct
  misc_feature 1..20: note = Description of Artificial Sequence: Synthetic oligonucleotide
  misc_feature 1..20: note = Target: ANGPTL4; (-) strand; PAM type: NRG; PAM sequence: GGG
  source 1..20: mol_type = other DNA
atccctggaggactcgagga

SEQ ID NO: 8518 - DNA, 20 bp, synthetic construct
  misc_feature 1..20: note = Description of Artificial Sequence: Synthetic oligonucleotide
  misc_feature 1..20: note = Target: ANGPTL4; (-) strand; PAM type: NRG; PAM sequence: AGG
  source 1..20: mol_type = other DNA
catccctggaggactcgagg

SEQ ID NO: 8519 - DNA, 20 bp, synthetic construct
  misc_feature 1..20: note = Description of Artificial Sequence: Synthetic oligonucleotide
  misc_feature 1..20: note = Target: ANGPTL4; (-) strand; PAM type: NRG; PAM sequence: GAG
  source 1..20: mol_type = other DNA
tcatccctggaggactcgag

SEQ ID NO: 8520 - DNA, 20 bp, synthetic construct
  misc_feature 1..20: note = Description of Artificial Sequence: Synthetic oligonucleotide
  misc_feature 1..20: note = Target: ANGPTL4; (-) strand; PAM type: NRG; PAM sequence: AGG
  source 1..20: mol_type = other DNA
actcatccctggaggactcg

SEQ ID NO: 8521 - DNA, 20 bp, synthetic construct
  misc_feature 1..20: note = Description of Artificial Sequence: Synthetic oligonucleotide
  misc_feature 1..20: note = Target: ANGPTL4; (-) strand; PAM type: NRG; PAM sequence: GAG
  source 1..20: mol_type = other DNA
cactcatccctggaggactc

SEQ ID NO: 8522 - DNA, 20 bp, synthetic construct
  misc_feature 1..20: note = Description of Artificial Sequence: Synthetic oligonucleotide
  misc_feature 1..20: note = Target: ANGPTL4; (-) strand; PAM type: NRG; PAM sequence: AGG
  source 1..20: mol_type = other DNA
gctccctcactcatccctgg

SEQ ID NO: 8523 - DNA, 20 bp, synthetic construct
  misc_feature 1..20: note = Description of Artificial Sequence: Synthetic oligonucleotide
  misc_feature 1..20: note = Target: ANGPTL4; (-) strand; PAM type: NRG; PAM sequence: GAG
  source 1..20: mol_type = other DNA
agctccctcactcatccctg

SEQ ID NO: 8524 - DNA, 20 bp, synthetic construct
  misc_feature 1..20: note = Description of Artificial Sequence: Synthetic oligonucleotide
  misc_feature 1..20: note = Target: ANGPTL4; (-) strand; PAM type: NRG; PAM sequence: TGG
  source 1..20: mol_type = other DNA
gcagctccctcactcatccc

SEQ ID NO: 8525 - DNA, 20 bp, synthetic construct
  misc_feature 1..20: note = Description of Artificial Sequence: Synthetic oligonucleotide
  misc_feature 1..20: note = Target: ANGPTL4; (-) strand; PAM type: NRG; PAM sequence: CAG
  source 1..20: mol_type = other DNA
ctccaaacccaggaagacag

SEQ ID NO: 8526 - DNA, 20 bp, synthetic construct
  misc_feature 1..20: note = Description of Artificial Sequence: Synthetic oligonucleotide
  misc_feature 1..20: note = Target: ANGPTL4; (-) strand; PAM type: NRG; PAM sequence: CAG
  source 1..20: mol_type = other DNA
cccctccaaacccaggaaga

SEQ ID NO: 8527 - DNA, 20 bp, synthetic construct
  misc_feature 1..20: note = Description of Artificial Sequence: Synthetic oligonucleotide
  misc_feature 1..20: note = Target: ANGPTL4; (-) strand; PAM type: NRG; PAM sequence: AAG
  source 1..20: mol_type = other DNA
aaaccccctccaaacccagg

SEQ ID NO: 8528 - DNA, 20 bp, synthetic construct
  misc_feature 1..20: note = Description of Artificial Sequence: Synthetic oligonucleotide
  misc_feature 1..20: note = Target: ANGPTL4; (-) strand; PAM type: NRG; PAM sequence: AGG
  source 1..20: mol_type = other DNA
accaaaccccctccaaaccc

SEQ ID NO: 8529 - DNA, 20 bp, synthetic construct
  misc_feature 1..20: note = Description of Artificial Sequence: Synthetic oligonucleotide
  misc_feature 1..20: note = Target: ANGPTL4; (-) strand; PAM type: NRG; PAM sequence: CAG
  source 1..20: mol_type = other DNA
caccaaaccccctccaaacc

SEQ ID NO: 8530 - DNA, 20 bp, synthetic construct
  misc_feature 1..20: note = Description of Artificial Sequence: Synthetic oligonucleotide
  misc_feature 1..20: note = Target: ANGPTL4; (-) strand; PAM type: NRG; PAM sequence: AAG
  source 1..20: mol_type = other DNA
cactccctcatctggctgcc

SEQ ID NO: 8531 - DNA, 20 bp, synthetic construct
  misc_feature 1..20: note = Description of Artificial Sequence: Synthetic oligonucleotide
  misc_feature 1..20: note = Target: ANGPTL4; (-) strand; PAM type: NRG; PAM sequence: TGG
  source 1..20: mol_type = other DNA
gacgaccccactccctcatc

SEQ ID NO: 8532 - DNA, 20 bp, synthetic construct
  misc_feature 1..20: note = Description of Artificial Sequence: Synthetic oligonucleotide
  misc_feature 1..20: note = Target: ANGPTL4; (-) strand; PAM type: NRG; PAM sequence: CAG
  source 1..20: mol_type = other DNA
caccaggaagtccctcttca

SEQ ID NO: 8533 - DNA, 20 bp, synthetic construct
  misc_feature 1..20: note = Description of Artificial Sequence: Synthetic oligonucleotide
  misc_feature 1..20: note = Target: ANGPTL4; (-) strand; PAM type: NRG; PAM sequence: AAG
  source 1..20: mol_type = other DNA
aaaggtacaaggtcaccagg

SEQ ID NO: 8534 - DNA, 20 bp, synthetic construct
  misc_feature 1..20: note = Description of Artificial Sequence: Synthetic oligonucleotide
  misc_feature 1..20: note = Target: ANGPTL4; (-) strand; PAM type: NRG; PAM sequence: AGG
  source 1..20: mol_type = other DNA
cagaaaggtacaaggtcacc

SEQ ID NO: 8535 - DNA, 20 bp, synthetic construct
  misc_feature 1..20: note = Description of Artificial Sequence: Synthetic oligonucleotide
  misc_feature 1..20: note = Target: ANGPTL4; (-) strand; PAM type: NRG; PAM sequence: CAG
  source 1..20: mol_type = other DNA
ccagaaaggtacaaggtcac

SEQ ID NO: 8536 - DNA, 20 bp, synthetic construct
  misc_feature 1..20: note = Description of Artificial Sequence: Synthetic oligonucleotide
  misc_feature 1..20: note = Target: ANGPTL4; (-) strand; PAM type: NRG; PAM sequence: AGG
  source 1..20: mol_type = other DNA
catctgcccagaaaggtaca

SEQ ID NO: 8537 - DNA, 20 bp, synthetic construct
  misc_feature 1..20: note = Description of Artificial Sequence: Synthetic oligonucleotide
  misc_feature 1..20: note = Target: ANGPTL4; (-) strand; PAM type: NRG; PAM sequence: AAG
  source 1..20: mol_type = other DNA
ccatctgcccagaaaggtac

SEQ ID NO: 8538 - DNA, 20 bp, synthetic construct
  misc_feature 1..20: note = Description of Artificial Sequence: Synthetic oligonucleotide
  misc_feature 1..20: note = Target: ANGPTL4; (-) strand; PAM type: NRG; PAM sequence: AGG
  source 1..20: mol_type = other DNA
cagcctccatctgcccagaa

SEQ ID NO: 8539 - DNA, 20 bp, synthetic construct
  misc_feature 1..20: note = Description of Artificial Sequence: Synthetic oligonucleotide
  misc_feature 1..20: note = Target: ANGPTL4; (-) strand; PAM type: NRG; PAM sequence: AAG
  source 1..20: mol_type = other DNA
ccagcctccatctgcccaga

SEQ ID NO: 8540 - DNA, 20 bp, synthetic construct
  misc_feature 1..20: note = Description of Artificial Sequence: Synthetic oligonucleotide
  misc_feature 1..20: note = Target: ANGPTL4; (-) strand; PAM type: NRG; PAM sequence: CAG
  source 1..20: mol_type = other DNA
ctgtccagcctccatctgcc

SEQ ID NO: 8541 - DNA, 20 bp, synthetic construct
  misc_feature 1..20: note = Description of Artificial Sequence: Synthetic oligonucleotide
  misc_feature 1..20: note = Target: ANGPTL4; (-) strand; PAM type: NRG; PAM sequence: CAG
  source 1..20: mol_type = other DNA
ggcgcctctgaattactgtc

SEQ ID NO: 8542 - DNA, 20 bp, synthetic construct
  misc_feature 1..20: note = Description of Artificial Sequence: Synthetic oligonucleotide
  misc_feature 1..20: note = Target: ANGPTL4; (-) strand; PAM type: NRG; PAM sequence: TGG
  source 1..20: mol_type = other DNA
tgaagtccactgagccatcg

SEQ ID NO: 8543 - DNA, 20 bp, synthetic construct
  misc_feature 1..20: note = Description of Artificial Sequence: Synthetic oligonucleotide
  misc_feature 1..20: note = Target: ANGPTL4; (-) strand; PAM type: NRG; PAM sequence: GAG
  source 1..20: mol_type = other DNA
agggccggttgaagtccact

SEQ ID NO: 8544 - DNA, 20 bp, synthetic construct
  misc_feature 1..20: note = Description of Artificial Sequence: Synthetic oligonucleotide
  misc_feature 1..20: note = Target: ANGPTL4; (-) strand; PAM type: NRG; PAM sequence: AAG
  source 1..20: mol_type = other DNA
aggcttcccagggccggttg

SEQ ID NO: 8545 - DNA, 20 bp, synthetic construct
  misc_feature 1..20: note = Description of Artificial Sequence: Synthetic oligonucleotide
  misc_feature 1..20: note = Target: ANGPTL4; (-) strand; PAM type: NRG; PAM sequence: CGG
  source 1..20: mol_type = other DNA
ccttgtaggcttcccagggc

SEQ ID NO: 8546 - DNA, 20 bp, synthetic construct
  misc_feature 1..20: note = Description of Artificial Sequence: Synthetic oligonucleotide
  misc_feature 1..20: note = Target: ANGPTL4; (-) strand; PAM type: NRG; PAM sequence: GGG
  source 1..20: mol_type = other DNA
cccgccttgtaggcttccca

SEQ ID NO: 8547 - DNA, 20 bp, synthetic construct
  misc_feature 1..20: note = Description of Artificial Sequence: Synthetic oligonucleotide
  misc_feature 1..20: note = Target: ANGPTL4; (-) strand; PAM type: NRG; PAM sequence: AGG
  source 1..20: mol_type = other DNA
ccccgccttgtaggcttccc

SEQ ID NO: 8548 - DNA, 20 bp, synthetic construct
  misc_feature 1..20: note = Description of Artificial Sequence: Synthetic oligonucleotide
  misc_feature 1..20: note = Target: ANGPTL4; (-) strand; PAM type: NRG; PAM sequence: CAG
  source 1..20: mol_type = other DNA
accccgccttgtaggcttcc

SEQ ID NO: 8549 - DNA, 20 bp, synthetic construct
  misc_feature 1..20: note = Description of Artificial Sequence: Synthetic oligonucleotide
  misc_feature 1..20: note = Target: ANGPTL4; (-) strand; PAM type: NRG; PAM sequence: AGG
  source 1..20: mol_type = other DNA
atccccaaaccccgccttgt

SEQ ID NO: 8550 - DNA, 20 bp, synthetic construct
  misc_feature 1..20: note = Description of Artificial Sequence: Synthetic oligonucleotide
  misc_feature 1..20: note = Target: ANGPTL4; (-) strand; PAM type: NRG; PAM sequence: TAG
  source 1..20: mol_type = other DNA
gatccccaaaccccgccttg

SEQ ID NO: 8551 - DNA, 20 bp, synthetic construct
  misc_feature 1..20: note = Description of Artificial Sequence: Synthetic oligonucleotide
  misc_feature 1..20: note = Target: ANGPTL4; (-) strand; PAM type: NRG; PAM sequence: GGG
  source 1..20: mol_type = other DNA
cactagaaacacctaccgtg

SEQ ID NO: 8552 - DNA, 20 bp, synthetic construct
  misc_feature 1..20: note = Description of Artificial Sequence: Synthetic oligonucleotide
  misc_feature 1..20: note = Target: ANGPTL4; (-) strand; PAM type: NRG; PAM sequence: GGG
  source 1..20: mol_type = other DNA
ccactagaaacacctaccgt

SEQ ID NO: 8553 - DNA, 20 bp, synthetic construct
  misc_feature 1..20: note = Description of Artificial Sequence: Synthetic oligonucleotide
  misc_feature 1..20: note = Target: ANGPTL4; (-) strand; PAM type: NRG; PAM sequence: TGG
  source 1..20: mol_type = other DNA
cccactagaaacacctaccg

SEQ ID NO: 8554 - DNA, 20 bp, synthetic construct
  misc_feature 1..20: note = Description of Artificial Sequence: Synthetic oligonucleotide
  misc_feature 1..20: note = Target: ANGPTL4; (-) strand; PAM type: NRG; PAM sequence: TAG
  source 1..20: mol_type = other DNA
tcccctgcctctgtccccac

SEQ ID NO: 8555 - DNA, 20 bp, synthetic construct
  misc_feature 1..20: note = Description of Artificial Sequence: Synthetic oligonucleotide
  misc_feature 1..20: note = Target: ANGPTL4; (-) strand; PAM type: NRG; PAM sequence: GGG
  source 1..20: mol_type = other DNA
tgaggcagggccacttctga

SEQ ID NO: 8556 - DNA, 20 bp, synthetic construct
  misc_feature 1..20: note = Description of Artificial Sequence: Synthetic oligonucleotide
  misc_feature 1..20: note = Target: ANGPTL4; (-) strand; PAM type: NRG; PAM sequence: AGG
  source 1..20: mol_type = other DNA
atgaggcagggccacttctg

SEQ ID NO: 8557 - DNA, 20 bp, synthetic construct
  misc_feature 1..20: note = Description of Artificial Sequence: Synthetic oligonucleotide
  misc_feature 1..20: note = Target: ANGPTL4; (-) strand; PAM type: NRG; PAM sequence: GAG
  source 1..20: mol_type = other DNA
catgaggcagggccacttct

SEQ ID NO: 8558 - DNA, 20 bp, synthetic construct
  misc_feature 1..20: note = Description of Artificial Sequence: Synthetic oligonucleotide
  misc_feature 1..20: note = Target: ANGPTL4; (-) strand; PAM type: NRG; PAM sequence: GGG
  source 1..20: mol_type = other DNA
agaggccactccatgaggca

SEQ ID NO: 8559 - DNA, 20 bp, synthetic construct
  misc_feature 1..20: note = Description of Artificial Sequence: Synthetic oligonucleotide
  misc_feature 1..20: note = Target: ANGPTL4; (-) strand; PAM type: NRG; PAM sequence: AGG
  source 1..20: mol_type = other DNA
gagaggccactccatgaggc

SEQ ID NO: 8560 - DNA, 20 bp, synthetic construct
  misc_feature 1..20: note = Description of Artificial Sequence: Synthetic oligonucleotide
  misc_feature 1..20: note = Target: ANGPTL4; (-) strand; PAM type: NRG; PAM sequence: CAG
  source 1..20: mol_type = other DNA
ggagaggccactccatgagg

SEQ ID NO: 8561 - DNA, 20 bp, synthetic construct
  misc_feature 1..20: note = Description of Artificial Sequence: Synthetic oligonucleotide
  misc_feature 1..20: note = Target: ANGPTL4; (-) strand; PAM type: NRG; PAM sequence: AGG
  source 1..20: mol_type = other DNA
gtgggagaggccactccatg

SEQ ID NO: 8562 - DNA, 20 bp, synthetic construct
  misc_feature 1..20: note = Description of Artificial Sequence: Synthetic oligonucleotide
  misc_feature 1..20: note = Target: ANGPTL4; (-) strand; PAM type: NRG; PAM sequence: GAG
  source 1..20: mol_type = other DNA
agtgggagaggccactccat

SEQ ID NO: 8563 - DNA, 20 bp, synthetic construct
  misc_feature 1..20: note = Description of Artificial Sequence: Synthetic oligonucleotide
  misc_feature 1..20: note = Target: ANGPTL4; (-) strand; PAM type: NRG; PAM sequence: AGG
  source 1..20: mol_type = other DNA
gaactcgcctggagtgggag

SEQ ID NO: 8564 - DNA, 20 bp, synthetic construct
  misc_feature 1..20: note = Description of Artificial Sequence: Synthetic oligonucleotide
  misc_feature 1..20: note = Target: ANGPTL4; (-) strand; PAM type: NRG; PAM sequence: GAG
  source 1..20: mol_type = other DNA
agaactcgcctggagtggga

SEQ ID NO: 8565 - DNA, 20 bp, synthetic construct
  misc_feature 1..20: note = Description of Artificial Sequence: Synthetic oligonucleotide
  misc_feature 1..20: note = Target: ANGPTL4; (-) strand; PAM type: NRG; PAM sequence: GAG
  source 1..20: mol_type = other DNA
ccagaactcgcctggagtgg

SEQ ID NO: 8566 - DNA, 20 bp, synthetic construct
  misc_feature 1..20: note = Description of Artificial Sequence: Synthetic oligonucleotide
  misc_feature 1..20: note = Target: ANGPTL4; (-) strand; PAM type: NRG; PAM sequence: GGG
  source 1..20: mol_type = other DNA
agccagaactcgcctggagt

SEQ ID NO: 8567 - DNA, 20 bp, synthetic construct
  misc_feature 1..20: note = Description of Artificial Sequence: Synthetic oligonucleotide
  misc_feature 1..20: note = Target: ANGPTL4; (-) strand; PAM type: NRG; PAM sequence: TGG
  source 1..20: mol_type = other DNA
cagccagaactcgcctggag

SEQ ID NO: 8568 - DNA, 20 bp, synthetic construct
  misc_feature 1..20: note = Description of Artificial Sequence: Synthetic oligonucleotide
  misc_feature 1..20: note = Target: ANGPTL4; (-) strand; PAM type: NRG; PAM sequence: GAG
  source 1..20: mol_type = other DNA
acccagccagaactcgcctg

SEQ ID NO: 8569 - DNA, 20 bp, synthetic construct
  misc_feature 1..20: note = Description of Artificial Sequence: Synthetic oligonucleotide
  misc_feature 1..20: note = Target: ANGPTL4; (-) strand; PAM type: NRG; PAM sequence: TGG
  source 1..20: mol_type = other DNA
agacccagccagaactcgcc

SEQ ID NO: 8570 - DNA, 20 bp, synthetic construct
  misc_feature 1..20: note = Description of Artificial Sequence: Synthetic oligonucleotide
  misc_feature 1..20: note = Target: ANGPTL4; (-) strand; PAM type: NRG; PAM sequence: CAG
  source 1..20: mol_type = other DNA
gcaccttctccagacccagc

SEQ ID NO: 8571 - DNA, 20 bp, synthetic construct
  misc_feature 1..20: note = Description of Artificial Sequence: Synthetic oligonucleotide
  misc_feature 1..20: note = Target: ANGPTL4; (-) strand; PAM type: NRG; PAM sequence: CAG
  source 1..20: mol_type = other DNA
ctatgcaccttctccagacc

SEQ ID NO: 8572 - DNA, 20 bp, synthetic construct
  misc_feature 1..20: note = Description of Artificial Sequence: Synthetic oligonucleotide
  misc_feature 1..20: note = Target: ANGPTL4; (-) strand; PAM type: NRG; PAM sequence: CAG
  source 1..20: mol_type = other DNA
gtgatgctatgcaccttctc

SEQ ID NO: 8573 - DNA, 20 bp, synthetic construct
  misc_feature 1..20: note = Description of Artificial Sequence: Synthetic oligonucleotide
  misc_feature 1..20: note = Target: ANGPTL4; (-) strand; PAM type: NRG; PAM sequence: CGG
  source 1..20: mol_type = other DNA
gcacggccaggcggctgttg

SEQ ID NO: 8574 - DNA, 20 bp, synthetic construct
  misc_feature 1..20: note = Description of Artificial Sequence: Synthetic oligonucleotide
  misc_feature 1..20: note = Target: ANGPTL4; (-) strand; PAM type: NRG; PAM sequence: CGG
  source 1..20: mol_type = other DNA
cccgcagctgcacggccagg

SEQ ID NO: 8575 - DNA, 20 bp, synthetic construct
  misc_feature 1..20: note = Description of Artificial Sequence: Synthetic oligonucleotide
  misc_feature 1..20: note = Target: ANGPTL4; (-) strand; PAM type: NRG; PAM sequence: AGG
  source 1..20: mol_type = other DNA
agtcccgcagctgcacggcc

SEQ ID NO: 8576 - DNA, 20 bp, synthetic construct
  misc_feature 1..20: note = Description of Artificial Sequence: Synthetic oligonucleotide
  misc_feature 1..20: note = Target: ANGPTL4; (-) strand; PAM type: NRG; PAM sequence: CAG
  source 1..20: mol_type = other DNA
cagtcccgcagctgcacggc

SEQ ID NO: 8577 - DNA, 20 bp, synthetic construct
  misc_feature 1..20: note = Description of Artificial Sequence: Synthetic oligonucleotide
  misc_feature 1..20: note = Target: ANGPTL4; (-) strand; PAM type: NRG; PAM sequence: CGG
  source 1..20: mol_type = other DNA
atcccagtcccgcagctgca

SEQ ID NO: 8578 - DNA, 20 bp, synthetic construct
  misc_feature 1..20: note = Description of Artificial Sequence: Synthetic oligonucleotide
  misc_feature 1..20: note = Target: ANGPTL4; (-) strand; PAM type: NRG; PAM sequence: CAG
  source 1..20: mol_type = other DNA
gcgttgccatcccagtcccg

SEQ ID NO: 8579 - DNA, 20 bp, synthetic construct
  misc_feature 1..20: note = Description of Artificial Sequence: Synthetic oligonucleotide
  misc_feature 1..20: note = Target: ANGPTL4; (-) strand; PAM type: NRG; PAM sequence: CAG
  source 1..20: mol_type = other DNA
gcaactcggcgttgccatcc

SEQ ID NO: 8580 - DNA, 20 bp, synthetic construct
  misc_feature 1..20: note = Description of Artificial Sequence: Synthetic oligonucleotide
  misc_feature 1..20: note = Target: ANGPTL4; (-) strand; PAM type: NRG; PAM sequence: CGG
  source 1..20: mol_type = other DNA
cacggagaactgcagcaact

SEQ ID NO: 8581 - DNA, 20 bp, synthetic construct
  misc_feature 1..20: note = Description of Artificial Sequence: Synthetic oligonucleotide
  misc_feature 1..20: note = Target: ANGPTL4; (-) strand; PAM type: NRG; PAM sequence: CAG
  source 1..20: mol_type = other DNA
cccaggtgcacggagaactg

SEQ ID NO: 8582 - DNA, 20 bp, synthetic construct
  misc_feature 1..20: note = Description of Artificial Sequence: Synthetic oligonucleotide
  misc_feature 1..20: note = Target: ANGPTL4; (-) strand; PAM type: NRG; PAM sequence: GAG
  source 1..20: mol_type = other DNA
cctcgccacccaggtgcacg

SEQ ID NO: 8583 - DNA, 20 bp, synthetic construct
  misc_feature 1..20: note = Description of Artificial Sequence: Synthetic oligonucleotide
  misc_feature 1..20: note = Target: ANGPTL4; (-) strand; PAM type: NRG; PAM sequence: CGG
  source 1..20: mol_type = other DNA
gtcctcgccacccaggtgca

SEQ ID NO: 8584 - DNA, 20 bp, synthetic construct
  misc_feature 1..20: note = Description of Artificial Sequence: Synthetic oligonucleotide
  misc_feature 1..20: note = Target: ANGPTL4; (-) strand; PAM type: NRG; PAM sequence: AGG
  source 1..20: mol_type = other DNA
aggccgtgtcctcgccaccc

SEQ ID NO: 8585 - DNA, 20 bp, synthetic construct
  misc_feature 1..20: note = Description of Artificial Sequence: Synthetic oligonucleotide
  misc_feature 1..20: note = Target: ANGPTL4; (-) strand; PAM type: NRG; PAM sequence: CAG
  source 1..20: mol_type = other DNA
taggccgtgtcctcgccacc

SEQ ID NO: 8586 - DNA, 20 bp, synthetic construct
  misc_feature 1..20: note = Description of Artificial Sequence: Synthetic oligonucleotide
  misc_feature 1..20: note = Target: ANGPTL4; (-) strand; PAM type: NRG; PAM sequence: AGG
  source 1..20: mol_type = other DNA
tgcagtgagctgcaggctat

SEQ ID NO: 8587 - DNA, 20 bp, synthetic construct
  misc_feature 1..20: note = Description of Artificial Sequence: Synthetic oligonucleotide
  misc_feature 1..20: note = Target: ANGPTL4; (-) strand; PAM type: NRG; PAM sequence: TAG
  source 1..20: mol_type = other DNA
gtgcagtgagctgcaggcta

SEQ ID NO: 8588 - DNA, 20 bp, synthetic construct
  misc_feature 1..20: note = Description of Artificial Sequence: Synthetic oligonucleotide
  misc_feature 1..20: note = Target: ANGPTL4; (-) strand; PAM type: NRG; PAM sequence: AGG
  source 1..20: mol_type = other DNA
ccacgggtgcagtgagctgc

SEQ ID NO: 8589 - DNA, 20 bp, synthetic construct
  misc_feature 1..20: note = Description of Artificial Sequence: Synthetic oligonucleotide
  misc_feature 1..20: note = Target: ANGPTL4; (-) strand; PAM type: NRG; PAM sequence: CAG
  source 1..20: mol_type = other DNA
gccacgggtgcagtgagctg

SEQ ID NO: 8590 - DNA, 20 bp, synthetic construct
  misc_feature 1..20: note = Description of Artificial Sequence: Synthetic oligonucleotide
  misc_feature 1..20: note = Target: ANGPTL4; (-) strand; PAM type: NRG; PAM sequence: GAG
  source 1..20: mol_type = other DNA
tggccggccacgggtgcagt

SEQ ID NO: 8591 - DNA, 20 bp, synthetic construct
  misc_feature 1..20: note = Description of Artificial Sequence: Synthetic oligonucleotide
  misc_feature 1..20: note = Target: ANGPTL4; (-) strand; PAM type: NRG; PAM sequence: CAG
  source 1..20: mol_type = other DNA
cagctggccggccacgggtg

SEQ ID NO: 8592 - DNA, 20 bp, synthetic construct
  misc_feature 1..20: note = Description of Artificial Sequence: Synthetic oligonucleotide
  misc_feature 1..20: note = Target: ANGPTL4; (-) strand; PAM type: NRG; PAM sequence: GGG
  source 1..20: mol_type = other DNA
gcgcccagctggccggccac

SEQ ID NO: 8593 - DNA, 20 bp, synthetic construct
  misc_feature 1..20: note = Description of Artificial Sequence: Synthetic oligonucleotide
  misc_feature 1..20: note = Target: ANGPTL4; (-) strand; PAM type: NRG; PAM sequence: CGG
  source 1..20: mol_type = other DNA
ggcgcccagctggccggcca

SEQ ID NO: 8594 - DNA, 20 bp, synthetic construct
  misc_feature 1..20: note = Description of Artificial Sequence: Synthetic oligonucleotide
  misc_feature 1..20: note = Target: ANGPTL4; (-) strand; PAM type: NRG; PAM sequence: CGG
  source 1..20: mol_type = other DNA
ggtggtggcgcccagctggc

SEQ ID NO: 8595 - DNA, 20 bp, synthetic construct
  misc_feature 1..20: note = Description of Artificial Sequence: Synthetic oligonucleotide
  misc_feature 1..20: note = Target: ANGPTL4; (-) strand; PAM type: NRG; PAM sequence: TGG
  source 1..20: mol_type = other DNA
ggacggtggtggcgcccagc

SEQ ID NO: 8596 - DNA, 20 bp, synthetic construct
  misc_feature 1..20: note = Description of Artificial Sequence: Synthetic oligonucleotide
  misc_feature 1..20: note = Target: ANGPTL4; (-) strand; PAM type: NRG; PAM sequence: CAG
  source 1..20: mol_type = other DNA
ggtgggacggtggtggcgcc

SEQ ID NO: 8597 - DNA, 20 bp, synthetic construct
  misc_feature 1..20: note = Description of Artificial Sequence: Synthetic oligonucleotide
  misc_feature 1..20: note = Target: ANGPTL4; (-) strand; PAM type: NRG; PAM sequence: TGG
  source 1..20: mol_type = other DNA
gccgctgggtgggacggtgg

SEQ ID NO: 8598 - DNA, 20 bp, synthetic construct
  misc_feature 1..20: note = Description of Artificial Sequence: Synthetic oligonucleotide
  misc_feature 1..20: note = Target: ANGPTL4; (-) strand; PAM type: NRG; PAM sequence: TGG
  source 1..20: mol_type = other DNA
gaggccgctgggtgggacgg

SEQ ID NO: 8599 - DNA, 20 bp, synthetic construct
  misc_feature 1..20: note = Description of Artificial Sequence: Synthetic oligonucleotide
  misc_feature 1..20: note = Target: ANGPTL4; (-) strand; PAM type: NRG; PAM sequence: CGG
  source 1..20: mol_type = other DNA
ggagaggccgctgggtggga

SEQ ID NO: 8600 - DNA, 20 bp, synthetic construct
  misc_feature 1..20: note = Description of Artificial Sequence: Synthetic oligonucleotide
  misc_feature 1..20: note = Target: ANGPTL4; (-) strand; PAM type: NRG; PAM sequence: GGG
  source 1..20: mol_type = other DNA
gtacggagaggccgctgggt

SEQ ID NO: 8601 - DNA, 20 bp, synthetic construct
  misc_feature 1..20: note = Description of Artificial Sequence: Synthetic oligonucleotide
  misc_feature 1..20: note = Target: ANGPTL4; (-) strand; PAM type: NRG; PAM sequence: TGG
  source 1..20: mol_type = other DNA
ggtacggagaggccgctggg

SEQ ID NO: 8602 - DNA, 20 bp, synthetic construct
  misc_feature 1..20: note = Description of Artificial Sequence: Synthetic oligonucleotide
  misc_feature 1..20: note = Target: ANGPTL4; (-) strand; PAM type: NRG; PAM sequence: GGG
  source 1..20: mol_type = other DNA
aagggtacggagaggccgct

SEQ ID NO: 8603 - DNA, 20 bp, synthetic construct
  misc_feature 1..20: note = Description of Artificial Sequence: Synthetic oligonucleotide
  misc_feature 1..20: note = Target: ANGPTL4; (-) strand; PAM type: NRG; PAM sequence: TGG
  source 1..20: mol_type = other DNA
gaagggtacggagaggccgc

SEQ ID NO: 8604 - DNA, 20 bp, synthetic construct
  misc_feature 1..20: note = Description of Artificial Sequence: Synthetic oligonucleotide
  misc_feature 1..20: note = Target: ANGPTL4; (-) strand; PAM type: NRG; PAM sequence: AGG
  source 1..20: mol_type = other DNA
aagtggagaagggtacggag

SEQ ID NO: 8605 - DNA, 20 bp, synthetic construct
  misc_feature 1..20: note = Description of Artificial Sequence: Synthetic oligonucleotide
  misc_feature 1..20: note = Target: ANGPTL4; (-) strand; PAM type: NRG; PAM sequence: GAG
  source 1..20: mol_type = other DNA
caagtggagaagggtacgga

SEQ ID NO: 8606 - DNA, 20 bp, synthetic construct
  misc_feature 1..20: note = Description of Artificial Sequence: Synthetic oligonucleotide
  misc_feature 1..20: note = Target: ANGPTL4; (-) strand; PAM type: NRG; PAM sequence: GAG
  source 1..20: mol_type = other DNA
cccaagtggagaagggtacg

SEQ ID NO: 8607 - DNA, 20 bp, synthetic construct
  misc_feature 1..20: note = Description of Artificial Sequence: Synthetic oligonucleotide
  misc_feature 1..20: note = Target: ANGPTL4; (-) strand; PAM type: NRG; PAM sequence: CGG
  source 1..20: mol_type = other DNA
gtcccaagtggagaagggta

SEQ ID NO: 8608 - DNA, 20 bp, synthetic construct
  misc_feature 1..20: note = Description of Artificial Sequence: Synthetic oligonucleotide
  misc_feature 1..20: note = Target: ANGPTL4; (-) strand; PAM type: NRG; PAM sequence: GGG
  source 1..20: mol_type = other DNA
tcctggtcccaagtggagaa

SEQ ID NO: 8609 - DNA, 20 bp, synthetic construct
  misc_feature 1..20: note = Description of Artificial Sequence: Synthetic oligonucleotide
  misc_feature 1..20: note = Target: ANGPTL4; (-) strand; PAM type: NRG; PAM sequence: AGG
  source 1..20: mol_type = other DNA
atcctggtcccaagtggaga

SEQ ID NO: 8610 - DNA, 20 bp, synthetic construct
  misc_feature 1..20: note = Description of Artificial Sequence: Synthetic oligonucleotide
  misc_feature 1..20: note = Target: ANGPTL4; (-) strand; PAM type: NRG; PAM sequence: AAG
  source 1..20: mol_type = other DNA
gatcctggtcccaagtggag

SEQ ID NO: 8611 - DNA, 20 bp, synthetic construct
  misc_feature 1..20: note = Description of Artificial Sequence: Synthetic oligonucleotide
  misc_feature 1..20: note = Target: ANGPTL4; (-) strand; PAM type: NRG; PAM sequence: GAG
  source 1..20: mol_type = other DNA
cgtgatcctggtcccaagtg

SEQ ID NO: 8612 - DNA, 20 bp, synthetic construct
  misc_feature 1..20: note = Description of Artificial Sequence: Synthetic oligonucleotide
  misc_feature 1..20: note = Target: ANGPTL4; (-) strand; PAM type: NRG; PAM sequence: TGG
  source 1..20: mol_type = other DNA
gtcgtgatcctggtcccaag

SEQ ID NO: 8613 - DNA, 20 bp, synthetic construct
  misc_feature 1..20: note = Description of Artificial Sequence: Synthetic oligonucleotide
  misc_feature 1..20: note = Target: ANGPTL4; (-) strand; PAM type: NRG; PAM sequence: AAG
  source 1..20: mol_type = other DNA
gaggtcgtgatcctggtccc

SEQ ID NO: 8614 - DNA, 20 bp, synthetic construct
  misc_feature 1..20: note = Description of Artificial Sequence: Synthetic oligonucleotide
  misc_feature 1..20: note = Target: ANGPTL4; (-) strand; PAM type: NRG; PAM sequence: TGG
  source 1..20: mol_type = other DNA
ccctgcggaggtcgtgatcc

SEQ ID NO: 8615 - DNA, 20 bp, synthetic construct
  misc_feature 1..20: note = Description of Artificial Sequence: Synthetic oligonucleotide
  misc_feature 1..20: note = Target: ANGPTL4; (-) strand; PAM type: NRG; PAM sequence: AGG
  source 1..20: mol_type = other DNA
cgcagttcttgtccctgcgg

SEQ ID NO: 8616 - DNA, 20 bp, synthetic construct
  misc_feature 1..20: note = Description of Artificial Sequence: Synthetic oligonucleotide
  misc_feature 1..20: note = Target: ANGPTL4; (-) strand; PAM type: NRG; PAM sequence: GAG
  source 1..20: mol_type = other DNA
gcgcagttcttgtccctgcg

SEQ ID NO: 8617 - DNA, 20 bp, synthetic construct
  misc_feature 1..20: note = Description of Artificial Sequence: Synthetic oligonucleotide
  misc_feature 1..20: note = Target: ANGPTL4; (-) strand; PAM type: NRG; PAM sequence: CGG
  source 1..20: mol_type = other DNA
tggcgcagttcttgtccctg

SEQ ID NO: 8618 - DNA, 20 bp, synthetic construct
  misc_feature 1..20: note = Description of Artificial Sequence: Synthetic oligonucleotide
  misc_feature 1..20: note = Target: ANGPTL4; (-) strand; PAM type: NRG; PAM sequence: CAG
  source 1..20: mol_type = other DNA
caccagagaggctcttggcg

SEQ ID NO: 8619 - DNA, 20 bp, synthetic construct
  misc_feature 1..20: note = Description of Artificial Sequence: Synthetic oligonucleotide
  misc_feature 1..20: note = Target: ANGPTL4; (-) strand; PAM type: NRG; PAM sequence: TGG
  source 1..20: mol_type = other DNA
ctgctcaccagagaggctct

SEQ ID NO: 8620 - DNA, 20 bp, synthetic construct
  misc_feature 1..20: note = Description of Artificial Sequence: Synthetic oligonucleotide
  misc_feature 1..20: note = Target: ANGPTL4; (-) strand; PAM type: NRG; PAM sequence: AGG
  source 1..20: mol_type = other DNA
gcagggcctgctcaccagag

SEQ ID NO: 8621 - DNA, 20 bp, synthetic construct
  misc_feature 1..20: note = Description of Artificial Sequence: Synthetic oligonucleotide
  misc_feature 1..20: note = Target: ANGPTL4; (-) strand; PAM type: NRG; PAM sequence: GAG
  source 1..20: mol_type = other DNA
ggcagggcctgctcaccaga

SEQ ID NO: 8622 - DNA, 20 bp, synthetic construct
  misc_feature 1..20: note = Description of Artificial Sequence: Synthetic oligonucleotide
  misc_feature 1..20: note = Target: ANGPTL4; (-) strand; PAM type: NRG; PAM sequence: GAG
  source 1..20: mol_type = other DNA
atggcagggcctgctcacca

SEQ ID NO: 8623 - DNA, 20 bp, synthetic construct
  misc_feature 1..20: note = Description of Artificial Sequence: Synthetic oligonucleotide
  misc_feature 1..20: note = Target: ANGPTL4; (-) strand; PAM type: NRG; PAM sequence: CAG
  source 1..20: mol_type = other DNA
gcatggcagggcctgctcac

SEQ ID NO: 8624 - DNA, 20 bp, synthetic construct
  misc_feature 1..20: note = Description of Artificial Sequence: Synthetic oligonucleotide
  misc_feature 1..20: note = Target: ANGPTL4; (-) strand; PAM type: NRG; PAM sequence: GGG
  source 1..20: mol_type = other DNA
tggctgggtgtggcatggca

SEQ ID NO: 8625 - DNA, 20 bp, synthetic construct
  misc_feature 1..20: note = Description of Artificial Sequence: Synthetic oligonucleotide
  misc_feature 1..20: note = Target: ANGPTL4; (-) strand; PAM type: NRG; PAM sequence: AGG
  source 1..20: mol_type = other DNA
ctggctgggtgtggcatggc

SEQ ID NO: 8626 - DNA, 20 bp, synthetic construct
  misc_feature 1..20: note = Description of Artificial Sequence: Synthetic oligonucleotide
  misc_feature 1..20: note = Target: ANGPTL4; (-) strand; PAM type: NRG; PAM sequence: CAG
  source 1..20: mol_type = other DNA
gctggctgggtgtggcatgg

SEQ ID NO: 8627 - DNA, 20 bp, synthetic construct
  misc_feature 1..20: note = Description of Artificial Sequence: Synthetic oligonucleotide
  misc_feature 1..20: note = Target: ANGPTL4; (-) strand; PAM type: NRG; PAM sequence: TGG
  source 1..20: mol_type = other DNA
gctgctggctgggtgtggca

SEQ ID NO: 8628 - DNA, 20 bp, synthetic construct
  misc_feature 1..20: note = Description of Artificial Sequence: Synthetic oligonucleotide
  misc_feature 1..20: note = Target: ANGPTL4; (-) strand; PAM type: NRG; PAM sequence: TGG
  source 1..20: mol_type = other DNA
gggaagctgctggctgggtg

SEQ ID NO: 8629 - DNA, 20 bp, synthetic construct
  misc_feature 1..20: note = Description of Artificial Sequence: Synthetic oligonucleotide
  misc_feature 1..20: note = Target: ANGPTL4; (-) strand; PAM type: NRG; PAM sequence: GGG
  source 1..20: mol_type = other DNA
aaggagggaagctgctggct

SEQ ID NO: 8630 - DNA, 20 bp, synthetic construct
  misc_feature 1..20: note = Description of Artificial Sequence: Synthetic oligonucleotide
  misc_feature 1..20: note = Target: ANGPTL4; (-) strand; PAM type: NRG; PAM sequence: TGG
  source 1..20: mol_type = other DNA
taaggagggaagctgctggc

SEQ ID NO: 8631 - DNA, 20 bp, synthetic construct
  misc_feature 1..20: note = Description of Artificial Sequence: Synthetic oligonucleotide
  misc_feature 1..20: note = Target: ANGPTL4; (-) strand; PAM type: NRG; PAM sequence: TGG
  source 1..20: mol_type = other DNA
aagataaggagggaagctgc

SEQ ID NO: 8632 - DNA, 20 bp, synthetic construct
  misc_feature 1..20: note = Description of Artificial Sequence: Synthetic oligonucleotide
  misc_feature 1..20: note = Target: ANGPTL4; (-) strand; PAM type: NRG; PAM sequence: AAG
  source 1..20: mol_type = other DNA
cagcagaaagataaggaggg

SEQ ID NO: 8633 - DNA, 20 bp, synthetic construct
  misc_feature 1..20: note = Description of Artificial Sequence: Synthetic oligonucleotide
  misc_feature 1..20: note = Target: ANGPTL4; (-) strand; PAM type: NRG; PAM sequence: GGG
  source 1..20: mol_type = other DNA
gagcagcagaaagataagga

SEQ ID NO: 8634 - DNA, 20 bp, synthetic construct
  misc_feature 1..20: note = Description of Artificial Sequence: Synthetic oligonucleotide
  misc_feature 1..20: note = Target: ANGPTL4; (-) strand; PAM type: NRG; PAM sequence: AGG
  source 1..20: mol_type = other DNA
agagcagcagaaagataagg

SEQ ID NO: 8635 - DNA, 20 bp, synthetic construct
  misc_feature 1..20: note = Description of Artificial Sequence: Synthetic oligonucleotide
  misc_feature 1..20: note = Target: ANGPTL4; (-) strand; PAM type: NRG; PAM sequence: GAG
  source 1..20: mol_type = other DNA
cagagcagcagaaagataag

SEQ ID NO: 8636 - DNA, 20 bp, synthetic construct
  misc_feature 1..20: note = Description of Artificial Sequence: Synthetic oligonucleotide
  misc_feature 1..20: note = Target: ANGPTL4; (-) strand; PAM type: NRG; PAM sequence: AGG
  source 1..20: mol_type = other DNA
gacagagcagcagaaagata

SEQ ID NO: 8637 - DNA, 20 bp, synthetic construct
  misc_feature 1..20: note = Description of Artificial Sequence: Synthetic oligonucleotide
  misc_feature 1..20: note = Target: ANGPTL4; (-) strand; PAM type: NRG; PAM sequence: AAG
  source 1..20: mol_type = other DNA
ggacagagcagcagaaagat

SEQ ID NO: 8638 - DNA, 20 bp, synthetic construct
  misc_feature 1..20: note = Description of Artificial Sequence: Synthetic oligonucleotide
  misc_feature 1..20: note = Target: ANGPTL4; (-) strand; PAM type: NRG; PAM sequence: AAG
  source 1..20: mol_type = other DNA
aggcaggacagagcagcaga

SEQ ID NO: 8639 - DNA, 20 bp, synthetic construct
  misc_feature 1..20: note = Description of Artificial Sequence: Synthetic oligonucleotide
  misc_feature 1..20: note = Target: ANGPTL4; (-) strand; PAM type: NRG; PAM sequence: CAG
  source 1..20: mol_type = other DNA
ttgaaggcaggacagagcag

SEQ ID NO: 8640 - DNA, 20 bp, synthetic construct
  misc_feature 1..20: note = Description of Artificial Sequence: Synthetic oligonucleotide
  misc_feature 1..20: note = Target: ANGPTL4; (-) strand; PAM type: NRG; PAM sequence: CAG
  source 1..20: mol_type = other DNA
gggttgaaggcaggacagag

SEQ ID NO: 8641 - DNA, 20 bp, synthetic construct
  misc_feature 1..20: note = Description of Artificial Sequence: Synthetic oligonucleotide
  misc_feature 1..20: note = Target: ANGPTL4; (-) strand; PAM type: NRG; PAM sequence: GAG
  source 1..20: mol_type = other DNA
gtggggttgaaggcaggaca

SEQ ID NO: 8642 - DNA, 20 bp, synthetic construct
  misc_feature 1..20: note = Description of Artificial Sequence: Synthetic oligonucleotide
  misc_feature 1..20: note = Target: ANGPTL4; (-) strand; PAM type: NRG; PAM sequence: CAG
  source 1..20: mol_type = other DNA
atgtggggttgaaggcagga

SEQ ID NO: 8643 - DNA, 20 bp, synthetic construct
  misc_feature 1..20: note = Description of Artificial Sequence: Synthetic oligonucleotide
  misc_feature 1..20: note = Target: ANGPTL4; (-) strand; PAM type: NRG; PAM sequence: AGG
  source 1..20: mol_type = other DNA
tgcaatgtggggttgaaggc

SEQ ID NO: 8644 - DNA, 20 bp, synthetic construct
  misc_feature 1..20: note = Description of Artificial Sequence: Synthetic oligonucleotide
  misc_feature 1..20: note = Target: ANGPTL4; (-) strand; PAM type: NRG; PAM sequence: CAG
  source 1..20: mol_type = other DNA
atgcaatgtggggttgaagg

SEQ ID NO: 8645 - DNA, 20 bp, synthetic construct
  misc_feature 1..20: note = Description of Artificial Sequence: Synthetic oligonucleotide
  misc_feature 1..20: note = Target: ANGPTL4; (-) strand; PAM type: NRG; PAM sequence: AGG
  source 1..20: mol_type = other DNA
cagatgcaatgtggggttga

SEQ ID NO: 8646 - DNA, 20 bp, synthetic construct
  misc_feature 1..20: note = Description of Artificial Sequence: Synthetic oligonucleotide
  misc_feature 1..20: note = Target: ANGPTL4; (-) strand; PAM type: NRG; PAM sequence: AAG
  source 1..20: mol_type = other DNA
acagatgcaatgtggggttg

SEQ ID NO: 8647 - DNA, 20 bp, synthetic construct
  misc_feature 1..20: note = Description of Artificial Sequence: Synthetic oligonucleotide
  misc_feature 1..20: note = Target: ANGPTL4; (-) strand; PAM type: NRG; PAM sequence: GGG
  source 1..20: mol_type = other DNA
caggaaacagatgcaatgtg

SEQ ID NO: 8648 - DNA, 20 bp, synthetic construct
  misc_feature 1..20: note = Description of Artificial Sequence: Synthetic oligonucleotide
  misc_feature 1..20: note = Target: ANGPTL4; (-) strand; PAM type: NRG; PAM sequence: GGG
  source 1..20: mol_type = other DNA
gcaggaaacagatgcaatgt

SEQ ID NO: 8649 - DNA, 20 bp, synthetic construct
  misc_feature 1..20: note = Description of Artificial Sequence: Synthetic oligonucleotide
  misc_feature 1..20: note = Target: ANGPTL4; (-) strand; PAM type: NRG; PAM sequence: TGG
  source 1..20: mol_type = other DNA
ggcaggaaacagatgcaatg

SEQ ID NO: 8650 - DNA, 20 bp, synthetic construct
  misc_feature 1..20: note = Description of Artificial Sequence: Synthetic oligonucleotide
  misc_feature 1..20: note = Target: ANGPTL4; (-) strand; PAM type: NRG; PAM sequence: CAG
  source 1..20: mol_type = other DNA
gaagaggtgggggcaggaaa

SEQ ID NO: 8651 - DNA, 20 bp, synthetic construct
  misc_feature 1..20: note = Description of Artificial Sequence: Synthetic oligonucleotide
  misc_feature 1..20: note = Target: ANGPTL4; (-) strand; PAM type: NRG; PAM sequence: AGG
  source 1..20: mol_type = other DNA
tgtaaggaagaggtgggggc

SEQ ID NO: 8652 - DNA, 20 bp, synthetic construct
  misc_feature 1..20: note = Description of Artificial Sequence: Synthetic oligonucleotide
  misc_feature 1..20: note = Target: ANGPTL4; (-) strand; PAM type: NRG; PAM sequence: CAG
  source 1..20: mol_type = other DNA
atgtaaggaagaggtggggg

SEQ ID NO: 8653 - DNA, 20 bp, synthetic construct
  misc_feature 1..20: note = Description of Artificial Sequence: Synthetic oligonucleotide
  misc_feature 1..20: note = Target: ANGPTL4; (-) strand; PAM type: NRG; PAM sequence: GGG
  source 1..20: mol_type = other DNA
ggcatgtaaggaagaggtgg

SEQ ID NO: 8654 - DNA, 20 bp, synthetic construct
  misc_feature 1..20: note = Description of Artificial Sequence: Synthetic oligonucleotide
  misc_feature 1..20: note = Target: ANGPTL4; (-) strand; PAM type: NRG; PAM sequence: GGG
  source 1..20: mol_type = other DNA
cggcatgtaaggaagaggtg

SEQ ID NO: 8655 - DNA, 20 bp, synthetic construct
  misc_feature 1..20: note = Description of Artificial Sequence: Synthetic oligonucleotide
  misc_feature 1..20: note = Target: ANGPTL4; (-) strand; PAM type: NRG; PAM sequence: GGG
  source 1..20: mol_type = other DNA
acggcatgtaaggaagaggt

SEQ ID NO: 8656 - DNA, 20 bp, synthetic construct
  misc_feature 1..20: note = Description of Artificial Sequence: Synthetic oligonucleotide
  misc_feature 1..20: note = Target: ANGPTL4; (-) strand; PAM type: NRG; PAM sequence: TGG
  source 1..20: mol_type = other DNA
cacggcatgtaaggaagagg

SEQ ID NO: 8657 - DNA, 20 bp, synthetic construct
  misc_feature 1..20: note = Description of Artificial Sequence: Synthetic oligonucleotide
  misc_feature 1..20: note = Target: ANGPTL4; (-) strand; PAM type: NRG; PAM sequence: AGG
  source 1..20: mol_type = other DNA
acacacggcatgtaaggaag

SEQ ID NO: 8658 - DNA, 20 bp, synthetic construct
  misc_feature 1..20: note = Description of Artificial Sequence: Synthetic oligonucleotide
  misc_feature 1..20: note = Target: ANGPTL4; (-) strand; PAM type: NRG; PAM sequence: GAG
  source 1..20: mol_type = other DNA
cacacacggcatgtaaggaa

SEQ ID NO: 8659 - DNA, 20 bp, synthetic construct
  misc_feature 1..20: note = Description of Artificial Sequence: Synthetic oligonucleotide
  misc_feature 1..20: note = Target: ANGPTL4; (-) strand; PAM type: NRG; PAM sequence: AAG
  source 1..20: mol_type = other DNA
cacacacacggcatgtaagg

SEQ ID NO: 8660 - DNA, 20 bp, synthetic construct
  misc_feature 1..20: note = Description of Artificial Sequence: Synthetic oligonucleotide
  misc_feature 1..20: note = Target: ANGPTL4; (-) strand; PAM type: NRG; PAM sequence: AGG
  source 1..20: mol_type = other DNA
aatcacacacacggcatgta

SEQ ID NO: 8661 - DNA, 20 bp, synthetic construct
  misc_feature 1..20: note = Description of Artificial Sequence: Synthetic oligonucleotide
  misc_feature 1..20: note = Target: ANGPTL4; (-) strand; PAM type: NRG; PAM sequence: AAG
  source 1..20: mol_type = other DNA
caatcacacacacggcatgt

SEQ ID NO: 8662 - DNA, 20 bp, synthetic construct
  misc_feature 1..20: note = Description of Artificial Sequence: Synthetic oligonucleotide
  misc_feature 1..20: note = Target: ANGPTL4; (-) strand; PAM type: NRG; PAM sequence: CGG
  source 1..20: mol_type = other DNA
tagtggcccaatcacacaca

SEQ ID NO: 8663 - DNA, 20 bp, synthetic construct
  misc_feature 1..20: note = Description of Artificial Sequence: Synthetic oligonucleotide
  misc_feature 1..20: note = Target: ANGPTL4; (-) strand; PAM type: NRG; PAM sequence: TGG
  source 1..20: mol_type = other DNA
ggccagataggctaagttag

SEQ ID NO: 8664 - DNA, 20 bp, synthetic construct
  misc_feature 1..20: note = Description of Artificial Sequence: Synthetic oligonucleotide
  misc_feature 1..20: note = Target: ANGPTL4; (-) strand; PAM type: NRG; PAM sequence: TAG
  source 1..20: mol_type = other DNA
tgaggccagataggctaagt

SEQ ID NO: 8665 - DNA, 20 bp, synthetic construct
  misc_feature 1..20: note = Description of Artificial Sequence: Synthetic oligonucleotide
  misc_feature 1..20: note = Target: ANGPTL4; (-) strand; PAM type: NRG; PAM sequence: AAG
  source 1..20: mol_type = other DNA
aaactgaggccagataggct

SEQ ID NO: 8666 - DNA, 20 bp, synthetic construct
  misc_feature 1..20: note = Description of Artificial Sequence: Synthetic oligonucleotide
  misc_feature 1..20: note = Target: ANGPTL4; (-) strand; PAM type: NRG; PAM sequence: AGG
  source 1..20: mol_type = other DNA
tgggaaaactgaggccagat

SEQ ID NO: 8667 - DNA, 20 bp, synthetic construct
  misc_feature 1..20: note = Description of Artificial Sequence: Synthetic oligonucleotide
  misc_feature 1..20: note = Target: ANGPTL4; (-) strand; PAM type: NRG; PAM sequence: TAG
  source 1..20: mol_type = other DNA
atgggaaaactgaggccaga

SEQ ID NO: 8668 - DNA, 20 bp, synthetic construct
  misc_feature 1..20: note = Description of Artificial Sequence: Synthetic oligonucleotide
  misc_feature 1..20: note = Target: ANGPTL4; (-) strand; PAM type: NRG; PAM sequence: CAG
  source 1..20: mol_type = other DNA
caggatgggaaaactgaggc

SEQ ID NO: 8669 - DNA, 20 bp, synthetic construct
  misc_feature 1..20: note = Description of Artificial Sequence: Synthetic oligonucleotide
  misc_feature 1..20: note = Target: ANGPTL4; (-) strand; PAM type: NRG; PAM sequence: AGG
  source 1..20: mol_type = other DNA
ttttcaggatgggaaaactg

SEQ ID NO: 8670 - DNA, 20 bp, synthetic construct
  misc_feature 1..20: note = Description of Artificial Sequence: Synthetic oligonucleotide
  misc_feature 1..20: note = Target: ANGPTL4; (-) strand; PAM type: NRG; PAM sequence: GAG
  source 1..20: mol_type = other DNA
cttttcaggatgggaaaact

SEQ ID NO: 8671 - DNA, 20 bp, synthetic construct
  misc_feature 1..20: note = Description of Artificial Sequence: Synthetic oligonucleotide
  misc_feature 1..20: note = Target: ANGPTL4; (-) strand; PAM type: NRG; PAM sequence: GGG
  source 1..20: mol_type = other DNA
gtcaagacccttttcaggat

SEQ ID NO: 8672 - DNA, 20 bp, synthetic construct
  misc_feature 1..20: note = Description of Artificial Sequence: Synthetic oligonucleotide
  misc_feature 1..20: note = Target: ANGPTL4; (-) strand; PAM type: NRG; PAM sequence: TGG
  source 1..20: mol_type = other DNA
ggtcaagacccttttcagga

SEQ ID NO: 8673 - DNA, 20 bp, synthetic construct
  misc_feature 1..20: note = Description of Artificial Sequence: Synthetic oligonucleotide
  misc_feature 1..20: note = Target: ANGPTL4; (-) strand; PAM type: NRG; PAM sequence: AGG
  source 1..20: mol_type = other DNA
agacggtcaagacccttttc

SEQ ID NO: 8674 - DNA, 20 bp, synthetic construct
  misc_feature 1..20: note = Description of Artificial Sequence: Synthetic oligonucleotide
  misc_feature 1..20: note = Target: ANGPTL4; (-) strand; PAM type: NRG; PAM sequence: CAG
  source 1..20: mol_type = other DNA
aagacggtcaagaccctttt

SEQ ID NO: 8675 - DNA, 20 bp, synthetic construct
  misc_feature 1..20: note = Description of Artificial Sequence: Synthetic oligonucleotide
  misc_feature 1..20: note = Target: ANGPTL4; (-) strand; PAM type: NRG; PAM sequence: AAG
  source 1..20: mol_type = other DNA
aaataaaagtaaagacggtc

SEQ ID NO: 8676 - DNA, 20 bp, synthetic construct
  misc_feature 1..20: note = Description of Artificial Sequence: Synthetic oligonucleotide
  misc_feature 1..20: note = Target: ANGPTL4; (-) strand; PAM type: NRG; PAM sequence: CGG
  source 1..20: mol_type = other DNA
taagtaaataaaagtaaaga

SEQ ID NO: 8677 - DNA, 20 bp, synthetic construct
  misc_feature 1..20: note = Description of Artificial Sequence: Synthetic oligonucleotide
  misc_feature 1..20: note = Target: ANGPTL4; (-) strand; PAM type: NRG; PAM sequence: AAG
  source 1..20: mol_type = other DNA
cacataagtaaataaaagta

SEQ ID NO: 8678 - DNA, 20 bp, synthetic construct
  misc_feature 1..20: note = Description of Artificial Sequence: Synthetic oligonucleotide
  misc_feature 1..20: note = Target: ANGPTL4; (-) strand; PAM type: NRG; PAM sequence: AAG
  source 1..20: mol_type = other DNA
acaaacacataagtaaataa

SEQ ID NO: 8679 - DNA, 20 bp, synthetic construct
  misc_feature 1..20: note = Description of Artificial Sequence: Synthetic oligonucleotide
  misc_feature 1..20: note = Target: ANGPTL4; (-) strand; PAM type: NRG; PAM sequence: AAG
  source 1..20: mol_type = other DNA
aaataaataaacaaacacat

SEQ ID NO: 8680 - DNA, 20 bp, synthetic construct
  misc_feature 1..20: note = Description of Artificial Sequence: Synthetic oligonucleotide
  misc_feature 1..20: note = Target: ANGPTL4; (-) strand; PAM type: NRG; PAM sequence: GAG
  source 1..20: mol_type = other DNA
tccagcctgggtgacaaagt

SEQ ID NO: 8681 - DNA, 20 bp, synthetic construct
  misc_feature 1..20: note = Description of Artificial Sequence: Synthetic oligonucleotide
  misc_feature 1..20: note = Target: ANGPTL4; (-) strand; PAM type: NRG; PAM sequence: AAG
  source 1..20: mol_type = other DNA
gcactccagcctgggtgaca

SEQ ID NO: 8682 - DNA, 20 bp, synthetic construct
  misc_feature 1..20: note = Description of Artificial Sequence: Synthetic oligonucleotide
  misc_feature 1..20: note = Target: ANGPTL4; (-) strand; PAM type: NRG; PAM sequence: GGG
  source 1..20: mol_type = other DNA
gccacaaagcactccagcct

SEQ ID NO: 8683 - DNA, 20 bp, synthetic construct
  misc_feature 1..20: note = Description of Artificial Sequence: Synthetic oligonucleotide
  misc_feature 1..20: note = Target: ANGPTL4; (-) strand; PAM type: NRG; PAM sequence: TGG
  source 1..20: mol_type = other DNA
tgccacaaagcactccagcc

SEQ ID NO: 8684 - DNA, 20 bp, synthetic construct
  misc_feature 1..20: note = Description of Artificial Sequence: Synthetic oligonucleotide
  misc_feature 1..20: note = Target: ANGPTL4; (-) strand; PAM type: NRG; PAM sequence: CAG
  source 1..20: mol_type = other DNA
gatcgtgccacaaagcactc

SEQ ID NO: 8685 - DNA, 20 bp, synthetic construct
  misc_feature 1..20: note = Description of Artificial Sequence: Synthetic oligonucleotide
  misc_feature 1..20: note = Target: ANGPTL4; (-) strand; PAM type: NRG; PAM sequence: AAG
  source 1..20: mol_type = other DNA
tgagccaagatcgtgccaca

SEQ ID NO: 8686 - DNA, 20 bp, synthetic construct
  misc_feature 1..20: note = Description of Artificial Sequence: Synthetic oligonucleotide
  misc_feature 1..20: note = Target: ANGPTL4; (-) strand; PAM type: NRG; PAM sequence: AAG
  source 1..20: mol_type = other DNA
ggtggagcttgcagtgagcc

SEQ ID NO: 8687 - DNA, 20 bp, synthetic construct
  misc_feature 1..20: note = Description of Artificial Sequence: Synthetic oligonucleotide
  misc_feature 1..20: note = Target: ANGPTL4; (-) strand; PAM type: NRG; PAM sequence: GAG
  source 1..20: mol_type = other DNA
caggaggtggagcttgcagt

SEQ ID NO: 8688 - DNA, 20 bp, synthetic construct
  misc_feature 1..20: note = Description of Artificial Sequence: Synthetic oligonucleotide
  misc_feature 1..20: note = Target: ANGPTL4; (-) strand; PAM type: NRG; PAM sequence: CAG
  source 1..20: mol_type = other DNA
aactcaggaggtggagcttg

SEQ ID NO: 8689 - DNA, 20 bp, synthetic construct
  misc_feature 1..20: note = Description of Artificial Sequence: Synthetic oligonucleotide
  misc_feature 1..20: note = Target: ANGPTL4; (-) strand; PAM type: NRG; PAM sequence: GAG
  source 1..20: mol_type = other DNA
tggtgtgaactcaggaggtg

SEQ ID NO: 8690 - DNA, 20 bp, synthetic construct
  misc_feature 1..20: note = Description of Artificial Sequence: Synthetic oligonucleotide
  misc_feature 1..20: note = Target: ANGPTL4; (-) strand; PAM type: NRG; PAM sequence: TGG
  source 1..20: mol_type = other DNA
aatggtgtgaactcaggagg

SEQ ID NO: 8691 - DNA, 20 bp, synthetic construct
  misc_feature 1..20: note = Description of Artificial Sequence: Synthetic oligonucleotide
  misc_feature 1..20: note = Target: ANGPTL4; (-) strand; PAM type: NRG; PAM sequence: AGG
  source 1..20: mol_type = other DNA
gagaatggtgtgaactcagg

SEQ ID NO: 8692 - DNA, 20 bp, synthetic construct
  misc_feature 1..20: note = Description of Artificial Sequence: Synthetic oligonucleotide
  misc_feature 1..20: note = Target: ANGPTL4; (-) strand; PAM type: NRG; PAM sequence: GAG
  source 1..20: mol_type = other DNA
ggagaatggtgtgaactcag

SEQ ID NO: 8693 - DNA, 20 bp, synthetic construct
  misc_feature 1..20: note = Description of Artificial Sequence: Synthetic oligonucleotide
  misc_feature 1..20: note = Target: ANGPTL4; (-) strand; PAM type: NRG; PAM sequence: AGG
  source 1..20: mol_type = other DNA
caggagaatggtgtgaactc

SEQ ID NO: 8694 - DNA, 20 bp, synthetic construct
  misc_feature 1..20: note = Description of Artificial Sequence: Synthetic oligonucleotide
  misc_feature 1..20: note = Target: ANGPTL4; (-) strand; PAM type: NRG; PAM sequence: CAG
  source 1..20: mol_type = other DNA
gcaggagaatggtgtgaact

SEQ ID NO: 8695 - DNA, 20 bp, synthetic construct
  misc_feature 1..20: note = Description of Artificial Sequence: Synthetic oligonucleotide
  misc_feature 1..20: note = Target: ANGPTL4; (-) strand; PAM type: NRG; PAM sequence: TGG
  source 1..20: mol_type = other DNA
gggaggctgaggcaggagaa

SEQ ID NO: 8696 - DNA, 20 bp, synthetic construct
  misc_feature 1..20: note = Description of Artificial Sequence: Synthetic oligonucleotide
  misc_feature 1..20: note = Target: ANGPTL4; (-) strand; PAM type: NRG; PAM sequence: GAG
  source 1..20: mol_type = other DNA
tactcgggaggctgaggcag

SEQ ID NO: 8697 - DNA, 20 bp, synthetic construct
  misc_feature 1..20: note = Description of Artificial Sequence: Synthetic oligonucleotide
  misc_feature 1..20: note = Target: ANGPTL4; (-) strand; PAM type: NRG; PAM sequence: AGG
  source 1..20: mol_type = other DNA
gctactcgggaggctgaggc

SEQ ID NO: 8698 - DNA, 20 bp, synthetic construct
  misc_feature 1..20: note = Description of Artificial Sequence: Synthetic oligonucleotide
  misc_feature 1..20: note = Target: ANGPTL4; (-) strand; PAM type: NRG; PAM sequence: CAG
  source 1..20: mol_type = other DNA
agctactcgggaggctgagg

SEQ ID NO: 8699 - DNA, 20 bp, synthetic construct
  misc_feature 1..20: note = Description of Artificial Sequence: Synthetic oligonucleotide
  misc_feature 1..20: note = Target: ANGPTL4; (-) strand; PAM type: NRG; PAM sequence: AGG
  source 1..20: mol_type = other DNA
cccagctactcgggaggctg

SEQ ID NO: 8700 - DNA, 20 bp, synthetic construct
  misc_feature 1..20: note = Description of Artificial Sequence: Synthetic oligonucleotide
  misc_feature 1..20: note = Target: ANGPTL4; (-) strand; PAM type: NRG; PAM sequence: GAG
  source 1..20: mol_type = other DNA
tcccagctactcgggaggct

SEQ ID NO: 8701 - DNA, 20 bp, synthetic construct
  misc_feature 1..20: note = Description of Artificial Sequence: Synthetic oligonucleotide
  misc_feature 1..20: note = Target: ANGPTL4; (-) strand; PAM type: NRG; PAM sequence: AGG
  source 1..20: mol_type = other DNA
tatagtcccagctactcggg

SEQ ID NO: 8702 - DNA, 20 bp, synthetic construct
  misc_feature 1..20: note = Description of Artificial Sequence: Synthetic oligonucleotide
  misc_feature 1..20: note = Target: ANGPTL4; (-) strand; PAM type: NRG; PAM sequence: GAG
  source 1..20: mol_type = other DNA
ctatagtcccagctactcgg

SEQ ID NO: 8703 - DNA, 20 bp, synthetic construct
  misc_feature 1..20: note = Description of Artificial Sequence: Synthetic oligonucleotide
  misc_feature 1..20: note = Target: ANGPTL4; (-) strand; PAM type: NRG; PAM sequence: GGG
  source 1..20: mol_type = other DNA
acctatagtcccagctactc

SEQ ID NO: 8704 - DNA, 20 bp, synthetic construct
  misc_feature 1..20: note = Description of Artificial Sequence: Synthetic oligonucleotide
  misc_feature 1..20: note = Target: ANGPTL4; (-) strand; PAM type: NRG; PAM sequence: CGG
  source 1..20: mol_type = other DNA
cacctatagtcccagctact

SEQ ID NO: 8705 - DNA, 20 bp, synthetic construct
  misc_feature 1..20: note = Description of Artificial Sequence: Synthetic oligonucleotide
  misc_feature 1..20: note = Target: ANGPTL4; (-) strand; PAM type: NRG; PAM sequence: CAG
  source 1..20: mol_type = other DNA
gtggtgggcacctatagtcc

SEQ ID NO: 8706 - DNA, 20 bp, synthetic construct
  misc_feature 1..20: note = Description of Artificial Sequence: Synthetic oligonucleotide
  misc_feature 1..20: note = Target: ANGPTL4; (-) strand; PAM type: NRG; PAM sequence: TAG
  source 1..20: mol_type = other DNA
ggcgtggtggtgggcaccta

SEQ ID NO: 8707 - DNA, 20 bp, synthetic construct
  misc_feature 1..20: note = Description of Artificial Sequence: Synthetic oligonucleotide
  misc_feature 1..20: note = Target: ANGPTL4; (-) strand; PAM type: NRG; PAM sequence: GGG
  source 1..20: mol_type = other DNA
aattagccaggcgtggtggt

SEQ ID NO: 8708 - DNA, 20 bp, synthetic construct
  misc_feature 1..20: note = Description of Artificial Sequence: Synthetic oligonucleotide
  misc_feature 1..20: note = Target: ANGPTL4; (-) strand; PAM type: NRG; PAM sequence: TGG
  source 1..20: mol_type = other DNA
aaattagccaggcgtggtgg

SEQ ID NO: 8709 - DNA, 20 bp, synthetic construct
  misc_feature 1..20: note = Description of Artificial Sequence: Synthetic oligonucleotide
  misc_feature 1..20: note = Target: ANGPTL4; (-) strand; PAM type: NRG; PAM sequence: TGG
  source 1..20: mol_type = other DNA
aaaaaattagccaggcgtgg

SEQ ID NO: 8710 - DNA, 20 bp, synthetic construct
  misc_feature 1..20: note = Description of Artificial Sequence: Synthetic oligonucleotide
  misc_feature 1..20: note = Target: ANGPTL4; (-) strand; PAM type: NRG; PAM sequence: TGG
  source 1..20: mol_type = other DNA
acaaaaaaattagccaggcg

SEQ ID NO: 8711 - DNA, 20 bp, synthetic construct
  misc_feature 1..20: note = Description of Artificial Sequence: Synthetic oligonucleotide
  misc_feature 1..20: note = Target: ANGPTL4; (-) strand; PAM type: NRG; PAM sequence: AGG
  source 1..20: mol_type = other DNA
aaaatacaaaaaaattagcc

SEQ ID NO: 8712 - DNA, 20 bp, synthetic construct
  misc_feature 1..20: note = Description of Artificial Sequence: Synthetic oligonucleotide
  misc_feature 1..20: note = Target: ANGPTL4; (-) strand; PAM type: NRG; PAM sequence: CAG
  source 1..20: mol_type = other DNA
aaaaatacaaaaaaattagc

SEQ ID NO: 8713 - DNA, 20 bp, synthetic construct
  misc_feature 1..20: note = Description of Artificial Sequence: Synthetic oligonucleotide
  misc_feature 1..20: note = Target: ANGPTL4; (-) strand; PAM type: NRG; PAM sequence: TAG
  source 1..20: mol_type = other DNA
tactaaaaatacaaaaaaat

SEQ ID NO: 8714 - DNA, 20 bp, synthetic construct
  misc_feature 1..20: note = Description of Artificial Sequence: Synthetic oligonucleotide
  misc_feature 1..20: note = Target: ANGPTL4; (-) strand; PAM type: NRG; PAM sequence: CGG
  source 1..20: mol_type = other DNA
cgagaccatcctggctaaca

SEQ ID NO: 8715 - DNA, 20 bp, synthetic construct
  misc_feature 1..20: note = Description of Artificial Sequence: Synthetic oligonucleotide
  misc_feature 1..20: note = Target: ANGPTL4; (-) strand; PAM type: NRG; PAM sequence: TGG
  source 1..20: mol_type = other DNA
tcaggagatcgagaccatcc

SEQ ID NO: 8716 - DNA, 20 bp, synthetic construct
  misc_feature 1..20: note = Description of Artificial Sequence: Synthetic oligonucleotide
  misc_feature 1..20: note = Target: ANGPTL4; (-) strand; PAM type: NRG; PAM sequence: GAG
  source 1..20: mol_type = other DNA
gatcacgaggtcaggagatc

SEQ ID NO: 8717 - DNA, 20 bp, synthetic construct
  misc_feature 1..20: note = Description of Artificial Sequence: Synthetic oligonucleotide
  misc_feature 1..20: note = Target: ANGPTL4; (-) strand; PAM type: NRG; PAM sequence: GAG
  source 1..20: mol_type = other DNA
caggcagatcacgaggtcag

SEQ ID NO: 8718 - DNA, 20 bp, synthetic construct
  misc_feature 1..20: note = Description of Artificial Sequence: Synthetic oligonucleotide
  misc_feature 1..20: note = Target: ANGPTL4; (-) strand; PAM type: NRG; PAM sequence: AGG
  source 1..20: mol_type = other DNA
ggcaggcagatcacgaggtc

SEQ ID NO: 8719 - DNA, 20 bp, synthetic construct
  misc_feature 1..20: note = Description of Artificial Sequence: Synthetic oligonucleotide
  misc_feature 1..20: note = Target: ANGPTL4; (-) strand; PAM type: NRG; PAM sequence: CAG
  source 1..20: mol_type = other DNA
aggcaggcagatcacgaggt

SEQ ID NO: 8720 - DNA, 20 bp, synthetic construct
  misc_feature 1..20: note = Description of Artificial Sequence: Synthetic oligonucleotide
  misc_feature 1..20: note = Target: ANGPTL4; (-) strand; PAM type: NRG; PAM sequence: AGG
  source 1..20: mol_type = other DNA
gctgaggcaggcagatcacg

SEQ ID NO: 8721 - DNA, 20 bp, synthetic construct
  misc_feature 1..20: note = Description of Artificial Sequence: Synthetic oligonucleotide
  misc_feature 1..20: note = Target: ANGPTL4; (-) strand; PAM type: NRG; PAM sequence: GAG
  source 1..20: mol_type = other DNA
ggctgaggcaggcagatcac

SEQ ID NO: 8722 - DNA, 20 bp, synthetic construct
  misc_feature 1..20: note = Description of Artificial Sequence: Synthetic oligonucleotide
  misc_feature 1..20: note = Target: ANGPTL4; (-) strand; PAM type: NRG; PAM sequence: CAG
  source 1..20: mol_type = other DNA
ctttgggaggctgaggcagg

SEQ ID NO: 8723 - DNA, 20 bp, synthetic construct
  misc_feature 1..20: note = Description of Artificial Sequence: Synthetic oligonucleotide
  misc_feature 1..20: note = Target: ANGPTL4; (-) strand; PAM type: NRG; PAM sequence: AGG
  source 1..20: mol_type = other DNA
gcactttgggaggctgaggc

SEQ ID NO: 8724 - DNA, 20 bp, synthetic construct
  misc_feature 1..20: note = Description of Artificial Sequence: Synthetic oligonucleotide
  misc_feature 1..20: note = Target: ANGPTL4; (-) strand; PAM type: NRG; PAM sequence: CAG
  source 1..20: mol_type = other DNA
agcactttgggaggctgagg

SEQ ID NO: 8725 - DNA, 20 bp, synthetic construct
  misc_feature 1..20: note = Description of Artificial Sequence: Synthetic oligonucleotide
  misc_feature 1..20: note = Target: ANGPTL4; (-) strand; PAM type: NRG; PAM sequence: AGG
  source 1..20: mol_type = other DNA
cccagcactttgggaggctg

SEQ ID NO: 8726 - DNA, 20 bp, synthetic construct
  misc_feature 1..20: note = Description of Artificial Sequence: Synthetic oligonucleotide
  misc_feature 1..20: note = Target: ANGPTL4; (-) strand; PAM type: NRG; PAM sequence: GAG
  source 1..20: mol_type = other DNA
tcccagcactttgggaggct

SEQ ID NO: 8727 - DNA, 20 bp, synthetic construct
  misc_feature 1..20: note = Description of Artificial Sequence: Synthetic oligonucleotide
  misc_feature 1..20: note = Target: ANGPTL4; (-) strand; PAM type: NRG; PAM sequence: AGG
  source 1..20: mol_type = other DNA
tgtaatcccagcactttggg

SEQ ID NO: 8728 - DNA, 20 bp, synthetic construct
  misc_feature 1..20: note = Description of Artificial Sequence: Synthetic oligonucleotide
  misc_feature 1..20: note = Target: ANGPTL4; (-) strand; PAM type: NRG; PAM sequence: GAG
  source 1..20: mol_type = other DNA
ctgtaatcccagcactttgg

SEQ ID NO: 8729 - DNA, 20 bp, synthetic construct
  misc_feature 1..20: note = Description of Artificial Sequence: Synthetic oligonucleotide
  misc_feature 1..20: note = Target: ANGPTL4; (-) strand; PAM type: NRG; PAM sequence: GGG
  source 1..20: mol_type = other DNA
gcctgtaatcccagcacttt

SEQ ID NO: 8730 - DNA, 20 bp, synthetic construct
  misc_feature 1..20: note = Description of Artificial Sequence: Synthetic oligonucleotide
  misc_feature 1..20: note = Target: ANGPTL4; (-) strand; PAM type: NRG; PAM sequence: TGG
  source 1..20: mol_type = other DNA
cgcctgtaatcccagcactt

SEQ ID NO: 8731 - DNA, 20 bp, synthetic construct
  misc_feature 1..20: note = Description of Artificial Sequence: Synthetic oligonucleotide
  misc_feature 1..20: note = Target: ANGPTL4; (-) strand; PAM type: NRG; PAM sequence: CAG
  source 1..20: mol_type = other DNA
gtggctcacgcctgtaatcc

SEQ ID NO: 8732 - DNA, 20 bp, synthetic construct
  misc_feature 1..20: note = Description of Artificial Sequence: Synthetic oligonucleotide
  misc_feature 1..20: note = Target: ANGPTL4; (-) strand; PAM type: NRG; PAM sequence: TGG
  source 1..20: mol_type = other DNA
aataagtaggccgggcgcgg

SEQ ID NO: 8733 - DNA, 20 bp, synthetic construct
  misc_feature 1..20: note = Description of Artificial Sequence: Synthetic oligonucleotide
  misc_feature 1..20: note = Target: ANGPTL4; (-) strand; PAM type: NRG; PAM sequence: CGG
  source 1..20: mol_type = other DNA
ataaataagtaggccgggcg

SEQ ID NO: 8734 - DNA, 20 bp, synthetic construct
  misc_feature 1..20: note = Description of Artificial Sequence: Synthetic oligonucleotide
  misc_feature 1..20: note = Target: ANGPTL4; (-) strand; PAM type: NRG; PAM sequence: GGG
  source 1..20: mol_type = other DNA
aaaaaataaataagtaggcc

SEQ ID NO: 8735 - DNA, 20 bp, synthetic construct
  misc_feature 1..20: note = Description of Artificial Sequence: Synthetic oligonucleotide
  misc_feature 1..20: note = Target: ANGPTL4; (-) strand; PAM type: NRG; PAM sequence: CGG
  source 1..20: mol_type = other DNA
caaaaaataaataagtaggc

SEQ ID NO: 8736 - DNA, 20 bp, synthetic construct
  misc_feature 1..20: note = Description of Artificial Sequence: Synthetic oligonucleotide
  misc_feature 1..20: note = Target: ANGPTL4; (-) strand; PAM type: NRG; PAM sequence: AGG
  source 1..20: mol_type = other DNA
gtctcaaaaaataaataagt

SEQ ID NO: 8737 - DNA, 20 bp, synthetic construct
  misc_feature 1..20: note = Description of Artificial Sequence: Synthetic oligonucleotide
  misc_feature 1..20: note = Target: ANGPTL4; (-) strand; PAM type: NRG; PAM sequence: TAG
  source 1..20: mol_type = other DNA
tgtctcaaaaaataaataag

SEQ ID NO: 8738 - DNA, 20 bp, synthetic construct
  misc_feature 1..20: note = Description of Artificial Sequence: Synthetic oligonucleotide
  misc_feature 1..20: note = Target: ANGPTL4; (-) strand; PAM type: NRG; PAM sequence: AAG
  source 1..20: mol_type = other DNA
ctctgtctcaaaaaataaat

SEQ ID NO: 8739 - DNA, 20 bp, synthetic construct
  misc_feature 1..20: note = Description of Artificial Sequence: Synthetic oligonucleotide
  misc_feature 1..20: note = Target: ANGPTL4; (-) strand; PAM type: NRG; PAM sequence: GGG
  source 1..20: mol_type = other DNA
tccagcctgggagacacagc

SEQ ID NO: 8740 - DNA, 20 bp, synthetic construct
  misc_feature 1..20: note = Description of Artificial Sequence: Synthetic oligonucleotide
  misc_feature 1..20: note = Target: ANGPTL4; (-) strand; PAM type: NRG; PAM sequence: CGG
  source 1..20: mol_type = other DNA
ctccagcctgggagacacag

SEQ ID NO: 8741 - DNA, 20 bp, synthetic construct
  misc_feature 1..20: note = Description of Artificial Sequence: Synthetic oligonucleotide
  misc_feature 1..20: note = Target: ANGPTL4; (-) strand; PAM type: NRG; PAM sequence: CAG
  source 1..20: mol_type = other DNA
gcactccagcctgggagaca

SEQ ID NO: 8742 - DNA, 20 bp, synthetic construct
  misc_feature 1..20: note = Description of Artificial Sequence: Synthetic oligonucleotide
  misc_feature 1..20: note = Target: ANGPTL4; (-) strand; PAM type: NRG; PAM sequence: GAG
  source 1..20: mol_type = other DNA
tcacttgcactccagcctgg

SEQ ID NO: 8743 - DNA, 20 bp, synthetic construct
  misc_feature 1..20: note = Description of Artificial Sequence: Synthetic oligonucleotide
  misc_feature 1..20: note = Target: ANGPTL4; (-) strand; PAM type: NRG; PAM sequence: GGG
  source 1..20: mol_type = other DNA
cgtcacttgcactccagcct

SEQ ID NO: 8744 - DNA, 20 bp, synthetic construct
  misc_feature 1..20: note = Description of Artificial Sequence: Synthetic oligonucleotide
  misc_feature 1..20: note = Target: ANGPTL4; (-) strand; PAM type: NRG; PAM sequence: TGG
  source 1..20: mol_type = other DNA
acgtcacttgcactccagcc

SEQ ID NO: 8745 - DNA, 20 bp, synthetic construct
  misc_feature 1..20: note = Description of Artificial Sequence: Synthetic oligonucleotide
  misc_feature 1..20: note = Target: ANGPTL4; (-) strand; PAM type: NRG; PAM sequence: CAG
  source 1..20: mol_type = other DNA
agatcacgtcacttgcactc

SEQ ID NO: 8746 - DNA, 20 bp, synthetic construct
  misc_feature 1..20: note = Description of Artificial Sequence: Synthetic oligonucleotide
  misc_feature 1..20: note = Target: ANGPTL4; (-) strand; PAM type: NRG; PAM sequence: AAG
  source 1..20: mol_type = other DNA
ggcggaggctgcagtgagcc

SEQ ID NO: 8747 - DNA, 20 bp, synthetic construct
  misc_feature 1..20: note = Description of Artificial Sequence: Synthetic oligonucleotide
  misc_feature 1..20: note = Target: ANGPTL4; (-) strand; PAM type: NRG; PAM sequence: GAG
  source 1..20: mol_type = other DNA
caggaggcggaggctgcagt

SEQ ID NO: 8748 - DNA, 20 bp, synthetic construct
  misc_feature 1..20: note = Description of Artificial Sequence: Synthetic oligonucleotide
  misc_feature 1..20: note = Target: ANGPTL4; (-) strand; PAM type: NRG; PAM sequence: CAG
  source 1..20: mol_type = other DNA
aacccaggaggcggaggctg

SEQ ID NO: 8749 - DNA, 20 bp, synthetic construct
  misc_feature 1..20: note = Description of Artificial Sequence: Synthetic oligonucleotide
  misc_feature 1..20: note = Target: ANGPTL4; (-) strand; PAM type: NRG; PAM sequence: AGG
  source 1..20: mol_type = other DNA
cacttgaacccaggaggcgg

SEQ ID NO: 8750 - DNA, 20 bp, synthetic construct
  misc_feature 1..20: note = Description of Artificial Sequence: Synthetic oligonucleotide
  misc_feature 1..20: note = Target: ANGPTL4; (-) strand; PAM type: NRG; PAM sequence: GAG
  source 1..20: mol_type = other DNA
tcacttgaacccaggaggcg

SEQ ID NO: 8751 - DNA, 20 bp, synthetic construct
  misc_feature 1..20: note = Description of Artificial Sequence: Synthetic oligonucleotide
  misc_feature 1..20: note = Target: ANGPTL4; (-) strand; PAM type: NRG; PAM sequence: CGG
  source 1..20: mol_type = other DNA
aatcacttgaacccaggagg

SEQ ID NO: 8752 - DNA, 20 bp, synthetic construct
  misc_feature 1..20: note = Description of Artificial Sequence: Synthetic oligonucleotide
  misc_feature 1..20: note = Target: ANGPTL4; (-) strand; PAM type: NRG; PAM sequence: AGG
  source 1..20: mol_type = other DNA
gagaatcacttgaacccagg

SEQ ID NO: 8753 - DNA, 20 bp, synthetic construct
  misc_feature 1..20: note = Description of Artificial Sequence: Synthetic oligonucleotide
  misc_feature 1..20: note = Target: ANGPTL4; (-) strand; PAM type: NRG; PAM sequence: GAG
  source 1..20: mol_type = other DNA
ggagaatcacttgaacccag

SEQ ID NO: 8754 - DNA, 20 bp, synthetic construct
  misc_feature 1..20: note = Description of Artificial Sequence: Synthetic oligonucleotide
  misc_feature 1..20: note = Target: ANGPTL4; (-) strand; PAM type: NRG; PAM sequence: AGG
  source 1..20: mol_type = other DNA
caggagaatcacttgaaccc

SEQ ID NO: 8755 - DNA, 20 bp, synthetic construct
  misc_feature 1..20: note = Description of Artificial Sequence: Synthetic oligonucleotide
  misc_feature 1..20: note = Target: ANGPTL4; (-) strand; PAM type: NRG; PAM sequence: CAG
  source 1..20: mol_type = other DNA
gcaggagaatcacttgaacc

SEQ ID NO: 8756 - DNA, 20 bp, synthetic construct
  misc_feature 1..20: note = Description of Artificial Sequence: Synthetic oligonucleotide
  misc_feature 1..20: note = Target: ANGPTL4; (-) strand; PAM type: NRG; PAM sequence: GAG
  source 1..20: mol_type = other DNA
tactcaggaggctgaggcag

SEQ ID NO: 8757 - DNA, 20 bp, synthetic construct
  misc_feature 1..20: note = Description of Artificial Sequence: Synthetic oligonucleotide
  misc_feature 1..20: note = Target: ANGPTL4; (-) strand; PAM type: NRG; PAM sequence: AGG
  source 1..20: mol_type = other DNA
gctactcaggaggctgaggc

SEQ ID NO: 8758 - DNA, 20 bp, synthetic construct
  misc_feature 1..20: note = Description of Artificial Sequence: Synthetic oligonucleotide
  misc_feature 1..20: note = Target: ANGPTL4; (-) strand; PAM type: NRG; PAM sequence: CAG
  source 1..20: mol_type = other DNA
agctactcaggaggctgagg

SEQ ID NO: 8759 - DNA, 20 bp, synthetic construct
  misc_feature 1..20: note = Description of Artificial Sequence: Synthetic oligonucleotide
  misc_feature 1..20: note = Target: ANGPTL4; (-) strand; PAM type: NRG; PAM sequence: AGG
  source 1..20: mol_type = other DNA
cccagctactcaggaggctg

SEQ ID NO: 8760 - DNA, 20 bp, synthetic construct
  misc_feature 1..20: note = Description of Artificial Sequence: Synthetic oligonucleotide
  misc_feature 1..20: note = Target: ANGPTL4; (-) strand; PAM type: NRG; PAM sequence: GAG
  source 1..20: mol_type = other DNA
tcccagctactcaggaggct

SEQ ID NO: 8761 - DNA, 20 bp, synthetic construct
  misc_feature 1..20: note = Description of Artificial Sequence: Synthetic oligonucleotide
  misc_feature 1..20: note = Target: ANGPTL4; (-) strand; PAM type: NRG; PAM sequence: AGG
  source 1..20: mol_type = other DNA
tgtaatcccagctactcagg

SEQ ID NO: 8762 - DNA, 20 bp, synthetic construct
  misc_feature 1..20: note = Description of Artificial Sequence: Synthetic oligonucleotide
  misc_feature 1..20: note = Target: ANGPTL4; (-) strand; PAM type: NRG; PAM sequence: GAG
  source 1..20: mol_type = other DNA
ctgtaatcccagctactcag

SEQ ID NO: 8763 - DNA, 20 bp, synthetic construct
  misc_feature 1..20: note = Description of Artificial Sequence: Synthetic oligonucleotide
  misc_feature 1..20: note = Target: ANGPTL4; (-) strand; PAM type: NRG; PAM sequence: AGG
  source 1..20: mol_type = other DNA
acctgtaatcccagctactc

SEQ ID NO: 8764 - DNA, 20 bp, synthetic construct
  misc_feature 1..20: note = Description of Artificial Sequence: Synthetic oligonucleotide
  misc_feature 1..20: note = Target: ANGPTL4; (-) strand; PAM type: NRG; PAM sequence: CAG
  source 1..20: mol_type = other DNA
aacctgtaatcccagctact

SEQ ID NO: 8765 - DNA, 20 bp, synthetic construct
  misc_feature 1..20: note = Description of Artificial Sequence: Synthetic oligonucleotide
  misc_feature 1..20: note = Target: ANGPTL4; (-) strand; PAM type: NRG; PAM sequence: CAG
  source 1..20: mol_type = other DNA
gtggcgggaacctgtaatcc

SEQ ID NO: 8766 - DNA, 20 bp, synthetic construct
  misc_feature 1..20: note = Description of Artificial Sequence: Synthetic oligonucleotide
  misc_feature 1..20: note = Target: ANGPTL4; (-) strand; PAM type: NRG; PAM sequence: GGG
  source 1..20: mol_type = other DNA
aattatctgtgcatggtggc

SEQ ID NO: 8767 - DNA, 20 bp, synthetic construct
  misc_feature 1..20: note = Description of Artificial Sequence: Synthetic oligonucleotide
  misc_feature 1..20: note = Target: ANGPTL4; (-) strand; PAM type: NRG; PAM sequence: CGG
  source 1..20: mol_type = other DNA
caattatctgtgcatggtgg

SEQ ID NO: 8768 - DNA, 20 bp, synthetic construct
  misc_feature 1..20: note = Description of Artificial Sequence: Synthetic oligonucleotide
  misc_feature 1..20: note = Target: ANGPTL4; (-) strand; PAM type: NRG; PAM sequence: TGG
  source 1..20: mol_type = other DNA
aaacaattatctgtgcatgg

SEQ ID NO: 8769 - DNA, 20 bp, synthetic construct
  misc_feature 1..20: note = Description of Artificial Sequence: Synthetic oligonucleotide
  misc_feature 1..20: note = Target: ANGPTL4; (-) strand; PAM type: NRG; PAM sequence: TGG
  source 1..20: mol_type = other DNA
acaaaacaattatctgtgca

SEQ ID NO: 8770 - DNA, 20 bp, synthetic construct
  misc_feature 1..20: note = Description of Artificial Sequence: Synthetic oligonucleotide
  misc_feature 1..20: note = Target: ANGPTL4; (-) strand; PAM type: NRG; PAM sequence: TGG
  source 1..20: mol_type = other DNA
caagaccaccctggccaaca

SEQ ID NO: 8771 - DNA, 20 bp, synthetic construct
  misc_feature 1..20: note = Description of Artificial Sequence: Synthetic oligonucleotide
  misc_feature 1..20: note = Target: ANGPTL4; (-) strand; PAM type: NRG; PAM sequence: TGG
  source 1..20: mol_type = other DNA
tcaggagttcaagaccaccc

SEQ ID NO: 8772 - DNA, 20 bp, synthetic construct
  misc_feature 1..20: note = Description of Artificial Sequence: Synthetic oligonucleotide
  misc_feature 1..20: note = Target: ANGPTL4; (-) strand; PAM type: NRG; PAM sequence: AAG
  source 1..20: mol_type = other DNA
tcacttgaggtcaggagttc

SEQ ID NO: 8773 - DNA, 20 bp, synthetic construct
  misc_feature 1..20: note = Description of Artificial Sequence: Synthetic oligonucleotide
  misc_feature 1..20: note = Target: ANGPTL4; (-) strand; PAM type: NRG; PAM sequence: GAG
  source 1..20: mol_type = other DNA
ggcagatcacttgaggtcag

SEQ ID NO: 8774 - DNA, 20 bp, synthetic construct
  misc_feature 1..20: note = Description of Artificial Sequence: Synthetic oligonucleotide
  misc_feature 1..20: note = Target: ANGPTL4; (-) strand; PAM type: NRG; PAM sequence: AGG
  source 1..20: mol_type = other DNA
tgggcagatcacttgaggtc

SEQ ID NO: 8775 - DNA, 20 bp, synthetic construct
  misc_feature 1..20: note = Description of Artificial Sequence: Synthetic oligonucleotide
  misc_feature 1..20: note = Target: ANGPTL4; (-) strand; PAM type: NRG; PAM sequence: CAG
  source 1..20: mol_type = other DNA
gtgggcagatcacttgaggt

SEQ ID NO: 8776 - DNA, 20 bp, synthetic construct
  misc_feature 1..20: note = Description of Artificial Sequence: Synthetic oligonucleotide
  misc_feature 1..20: note = Target: ANGPTL4; (-) strand; PAM type: NRG; PAM sequence: AGG
  source 1..20: mol_type = other DNA
cgaggtgggcagatcacttg

SEQ ID NO: 8777 - DNA, 20 bp, synthetic construct
  misc_feature 1..20: note = Description of Artificial Sequence: Synthetic oligonucleotide
  misc_feature 1..20: note = Target: ANGPTL4; (-) strand; PAM type: NRG; PAM sequence: GAG
  source 1..20: mol_type = other DNA
ccgaggtgggcagatcactt

SEQ ID NO: 8778 - DNA, 20 bp, synthetic construct
  misc_feature 1..20: note = Description of Artificial Sequence: Synthetic oligonucleotide
  misc_feature 1..20: note = Target: ANGPTL4; (-) strand; PAM type: NRG; PAM sequence: CAG
  source 1..20: mol_type = other DNA
ctttgggaggccgaggtggg

SEQ ID NO: 8779 - DNA, 20 bp, synthetic construct
  misc_feature 1..20: note = Description of Artificial Sequence: Synthetic oligonucleotide
  misc_feature 1..20: note = Target: ANGPTL4; (-) strand; PAM type: NRG; PAM sequence: GGG
  source 1..20: mol_type = other DNA
acactttgggaggccgaggt

SEQ ID NO: 8780 - DNA, 20 bp, synthetic construct
  misc_feature 1..20: note = Description of Artificial Sequence: Synthetic oligonucleotide
  misc_feature 1..20: note = Target: ANGPTL4; (-) strand; PAM type: NRG; PAM sequence: TGG
  source 1..20: mol_type = other DNA
aacactttgggaggccgagg

SEQ ID NO: 8781 - DNA, 20 bp, synthetic construct
  misc_feature 1..20: note = Description of Artificial Sequence: Synthetic oligonucleotide
  misc_feature 1..20: note = Target: ANGPTL4; (-) strand; PAM type: NRG; PAM sequence: AGG
  source 1..20: mol_type = other DNA
cccaacactttgggaggccg

SEQ ID NO: 8782 - DNA, 20 bp, synthetic construct
  misc_feature 1..20: note = Description of Artificial Sequence: Synthetic oligonucleotide
  misc_feature 1..20: note = Target: ANGPTL4; (-) strand; PAM type: NRG; PAM sequence: GAG
  source 1..20: mol_type = other DNA
tcccaacactttgggaggcc

SEQ ID NO: 8783 - DNA, 20 bp, synthetic construct
  misc_feature 1..20: note = Description of Artificial Sequence: Synthetic oligonucleotide
  misc_feature 1..20: note = Target: ANGPTL4; (-) strand; PAM type: NRG; PAM sequence: AGG
  source 1..20: mol_type = other DNA
tgtaatcccaacactttggg

SEQ ID NO: 8784 - DNA, 20 bp, synthetic construct
  misc_feature 1..20: note = Description of Artificial Sequence: Synthetic oligonucleotide
  misc_feature 1..20: note = Target: ANGPTL4; (-) strand; PAM type: NRG; PAM sequence: GAG
  source 1..20: mol_type = other DNA
ctgtaatcccaacactttgg

SEQ ID NO: 8785 - DNA, 20 bp, synthetic construct
  misc_feature 1..20: note = Description of Artificial Sequence: Synthetic oligonucleotide
  misc_feature 1..20: note = Target: ANGPTL4; (-) strand; PAM type: NRG; PAM sequence: GGG
  source 1..20: mol_type = other DNA
gcctgtaatcccaacacttt

SEQ ID NO: 8786 - DNA, 20 bp, synthetic construct
  misc_feature 1..20: note = Description of Artificial Sequence: Synthetic oligonucleotide
  misc_feature 1..20: note = Target: ANGPTL4; (-) strand; PAM type: NRG; PAM sequence: TGG
  source 1..20: mol_type = other DNA
cgcctgtaatcccaacactt

SEQ ID NO: 8787 - DNA, 20 bp, synthetic construct
  misc_feature 1..20: note = Description of Artificial Sequence: Synthetic oligonucleotide
  misc_feature 1..20: note = Target: ANGPTL4; (-) strand; PAM type: NRG; PAM sequence: TGG
  source 1..20: mol_type = other DNA
atgtttgtggccgggtattg

SEQ ID NO: 8788 - DNA, 20 bp, synthetic construct
  misc_feature 1..20: note = Description of Artificial Sequence: Synthetic oligonucleotide
  misc_feature 1..20: note = Target: ANGPTL4; (-) strand; PAM type: NRG; PAM sequence: GGG
  source 1..20: mol_type = other DNA
ttataaagatgtttgtggcc

SEQ ID NO: 8789 - DNA, 20 bp, synthetic construct
  misc_feature 1..20: note = Description of Artificial Sequence: Synthetic oligonucleotide
  misc_feature 1..20: note = Target: ANGPTL4; (-) strand; PAM type: NRG; PAM sequence: CGG
  source 1..20: mol_type = other DNA
attataaagatgtttgtggc

SEQ ID NO: 8790 - DNA, 20 bp, synthetic construct
  misc_feature 1..20: note = Description of Artificial Sequence: Synthetic oligonucleotide
  misc_feature 1..20: note = Target: ANGPTL4; (-) strand; PAM type: NRG; PAM sequence: TGG
  source 1..20: mol_type = other DNA
caccattataaagatgtttg

SEQ ID NO: 8791 - DNA, 20 bp, synthetic construct
  misc_feature 1..20: note = Description of Artificial Sequence: Synthetic oligonucleotide
  misc_feature 1..20: note = Target: ANGPTL4; (-) strand; PAM type: NRG; PAM sequence: AAG
  source 1..20: mol_type = other DNA
tcctgtggagcaccattata

SEQ ID NO: 8792 - DNA, 20 bp, synthetic construct
  misc_feature 1..20: note = Description of Artificial Sequence: Synthetic oligonucleotide
  misc_feature 1..20: note = Target: ANGPTL4; (-) strand; PAM type: NRG; PAM sequence: GAG
  source 1..20: mol_type = other DNA
aaaaaaaaaagaatcctgtg

SEQ ID NO: 8793 - DNA, 20 bp, synthetic construct
  misc_feature 1..20: note = Description of Artificial Sequence: Synthetic oligonucleotide
  misc_feature 1..20: note = Target: ANGPTL4; (-) strand; PAM type: NRG; PAM sequence: TGG
  source 1..20: mol_type = other DNA
aaaaaaaaaaaagaatcctg

SEQ ID NO: 8794 - DNA, 20 bp, synthetic construct
  misc_feature 1..20: note = Description of Artificial Sequence: Synthetic oligonucleotide
  misc_feature 1..20: note = Target: ANGPTL4; (-) strand; PAM type: NRG; PAM sequence: AAG
  source 1..20: mol_type = other DNA
ttcaaaaaaaaaaaaaaaaa

SEQ ID NO: 8795 - DNA, 20 bp, synthetic construct
  misc_feature 1..20: note = Description of Artificial Sequence: Synthetic oligonucleotide
  misc_feature 1..20: note = Target: ANGPTL4; (-) strand; PAM type: NRG; PAM sequence: GAG
  source 1..20: mol_type = other DNA
tccagcttaggcaacagagt

SEQ ID NO: 8796 - DNA, 20 bp, synthetic construct
  misc_feature 1..20: note = Description of Artificial Sequence: Synthetic oligonucleotide
  misc_feature 1..20: note = Target: ANGPTL4; (-) strand; PAM type: NRG; PAM sequence: GAG
  source 1..20: mol_type = other DNA
gcactccagcttaggcaaca

SEQ ID NO: 8797 - DNA, 20 bp, synthetic construct
  misc_feature 1..20: note = Description of Artificial Sequence: Synthetic oligonucleotide
  misc_feature 1..20: note = Target: ANGPTL4; (-) strand; PAM type: NRG; PAM sequence: CAG
  source 1..20: mol_type = other DNA
ctgcactccagcttaggcaa

SEQ ID NO: 8798 - DNA, 20 bp, synthetic construct
  misc_feature 1..20: note = Description of Artificial Sequence: Synthetic oligonucleotide
  misc_feature 1..20: note = Target: ANGPTL4; (-) strand; PAM type: NRG; PAM sequence: AGG
  source 1..20: mol_type = other DNA
gcaccactgcactccagctt

SEQ ID NO: 8799 - DNA, 20 bp, synthetic construct
  misc_feature 1..20: note = Description of Artificial Sequence: Synthetic oligonucleotide
  misc_feature 1..20: note = Target: ANGPTL4; (-) strand; PAM type: NRG; PAM sequence: TAG
  source 1..20: mol_type = other DNA
cgcaccactgcactccagct

SEQ ID NO: 8800 - DNA, 20 bp, synthetic construct
  misc_feature 1..20: note = Description of Artificial Sequence: Synthetic oligonucleotide
  misc_feature 1..20: note = Target: ANGPTL4; (-) strand; PAM type: NRG; PAM sequence: CAG
  source 1..20: mol_type = other DNA
gagatcgcaccactgcactc

SEQ ID NO: 8801 - DNA, 20 bp, synthetic construct
  misc_feature 1..20: note = Description of Artificial Sequence: Synthetic oligonucleotide
  misc_feature 1..20: note = Target: ANGPTL4; (-) strand; PAM type: NRG; PAM sequence: GAG
  source 1..20: mol_type = other DNA
ggtggaggttgcagtgagcc

SEQ ID NO: 8802 - DNA, 20 bp, synthetic construct
  misc_feature 1..20: note = Description of Artificial Sequence: Synthetic oligonucleotide
  misc_feature 1..20: note = Target: ANGPTL4; (-) strand; PAM type: NRG; PAM sequence: GAG
  source 1..20: mol_type = other DNA
cgggaggtggaggttgcagt

SEQ ID NO: 8803 - DNA, 20 bp, synthetic construct
  misc_feature 1..20: note = Description of Artificial Sequence: Synthetic oligonucleotide
  misc_feature 1..20: note = Target: ANGPTL4; (-) strand; PAM type: NRG; PAM sequence: CAG
  source 1..20: mol_type = other DNA
aacccgggaggtggaggttg

SEQ ID NO: 8804 - DNA, 20 bp, synthetic construct
  misc_feature 1..20: note = Description of Artificial Sequence: Synthetic oligonucleotide
  misc_feature 1..20: note = Target: ANGPTL4; (-) strand; PAM type: NRG; PAM sequence: AGG
  source 1..20: mol_type = other DNA
tgcttgaacccgggaggtgg

SEQ ID NO: 8805 - DNA, 20 bp, synthetic construct
  misc_feature 1..20: note = Description of Artificial Sequence: Synthetic oligonucleotide
  misc_feature 1..20: note = Target: ANGPTL4; (-) strand; PAM type: NRG; PAM sequence: GAG
  source 1..20: mol_type = other DNA
ttgcttgaacccgggaggtg

SEQ ID NO: 8806 - DNA, 20 bp, synthetic construct
  misc_feature 1..20: note = Description of Artificial Sequence: Synthetic oligonucleotide
  misc_feature 1..20: note = Target: ANGPTL4; (-) strand; PAM type: NRG; PAM sequence: TGG
  source 1..20: mol_type = other DNA
aattgcttgaacccgggagg

SEQ ID NO: 8807 - DNA, 20 bp, synthetic construct
  misc_feature 1..20: note = Description of Artificial Sequence: Synthetic oligonucleotide
  misc_feature 1..20: note = Target: ANGPTL4; (-) strand; PAM type: NRG; PAM sequence: AGG
  source 1..20: mol_type = other DNA
gagaattgcttgaacccggg

SEQ ID NO: 8808 - DNA, 20 bp, synthetic construct
  misc_feature 1..20: note = Description of Artificial Sequence: Synthetic oligonucleotide
  misc_feature 1..20: note = Target: ANGPTL4; (-) strand; PAM type: NRG; PAM sequence: GAG
  source 1..20: mol_type = other DNA
tgagaattgcttgaacccgg

SEQ ID NO: 8809 - DNA, 20 bp, synthetic construct
  misc_feature 1..20: note = Description of Artificial Sequence: Synthetic oligonucleotide
  misc_feature 1..20: note = Target: ANGPTL4; (-) strand; PAM type: NRG; PAM sequence: GGG
  source 1..20: mol_type = other DNA
tttgagaattgcttgaaccc

SEQ ID NO: 8810 - DNA, 20 bp, synthetic construct
  misc_feature 1..20: note = Description of Artificial Sequence: Synthetic oligonucleotide
  misc_feature 1..20: note = Target: ANGPTL4; (-) strand; PAM type: NRG; PAM sequence: CGG
  source 1..20: mol_type = other DNA
ttttgagaattgcttgaacc

SEQ ID NO: 8811 - DNA, 20 bp, synthetic construct
  misc_feature 1..20: note = Description of Artificial Sequence: Synthetic oligonucleotide
  misc_feature 1..20: note = Target: ANGPTL4; (-) strand; PAM type: NRG; PAM sequence: GAG
  source 1..20: mol_type = other DNA
cctaattttttttttttttt

SEQ ID NO: 8812 - DNA, 20 bp, synthetic construct
  misc_feature 1..20: note = Description of Artificial Sequence: Synthetic oligonucleotide
  misc_feature 1..20: note = Target: ANGPTL4; (-) strand; PAM type: NRG; PAM sequence: GAG
  source 1..20: mol_type = other DNA
agtgctgggattgcaagtgt

SEQ ID NO: 8813 - DNA, 20 bp, synthetic construct
  misc_feature 1..20: note = Description of Artificial Sequence: Synthetic oligonucleotide
  misc_feature 1..20: note = Target: ANGPTL4; (-) strand; PAM type: NRG; PAM sequence: AAG
  source 1..20: mol_type = other DNA
tcccaaagtgctgggattgc

SEQ ID NO: 8814 - DNA, 20 bp, synthetic construct
  misc_feature 1..20: note = Description of Artificial Sequence: Synthetic oligonucleotide
  misc_feature 1..20: note = Target: ANGPTL4; (-) strand; PAM type: NRG; PAM sequence: GGG
  source 1..20: mol_type = other DNA
cttcagcctcccaaagtgct

SEQ ID NO: 8815 - DNA, 20 bp, synthetic construct
  misc_feature 1..20: note = Description of Artificial Sequence: Synthetic oligonucleotide
  misc_feature 1..20: note = Target: ANGPTL4; (-) strand; PAM type: NRG; PAM sequence: TGG
  source 1..20: mol_type = other DNA
gcttcagcctcccaaagtgc

SEQ ID NO: 8816 - DNA, 20 bp, synthetic construct
  misc_feature 1..20: note = Description of Artificial Sequence: Synthetic oligonucleotide
  misc_feature 1..20: note = Target: ANGPTL4; (-) strand; PAM type: NRG; PAM sequence: AAG
  source 1..20: mol_type = other DNA
ccactcgcttcagcctccca

SEQ ID NO: 8817 - DNA, 20 bp, synthetic construct
  misc_feature 1..20: note = Description of Artificial Sequence: Synthetic oligonucleotide
  misc_feature 1..20: note = Target: ANGPTL4; (-) strand; PAM type: NRG; PAM sequence: CAG
  source 1..20: mol_type = other DNA
ctcaagtgatccactcgctt

SEQ ID NO: 8818 - DNA, 20 bp, synthetic construct
  misc_feature 1..20: note = Description of Artificial Sequence: Synthetic oligonucleotide
  misc_feature 1..20: note = Target: ANGPTL4; (-) strand; PAM type: NRG; PAM sequence: AAG
  source 1..20: mol_type = other DNA
cagattggtctcctgggctc

SEQ ID NO: 8819 - DNA, 20 bp, synthetic construct
  misc_feature 1..20: note = Description of Artificial Sequence: Synthetic oligonucleotide
  misc_feature 1..20: note = Target: ANGPTL4; (-) strand; PAM type: NRG; PAM sequence: GGG
  source 1..20: mol_type = other DNA
gttgctcagattggtctcct

SEQ ID NO: 8820 - DNA, 20 bp, synthetic construct
  misc_feature 1..20: note = Description of Artificial Sequence: Synthetic oligonucleotide
  misc_feature 1..20: note = Target: ANGPTL4; (-) strand; PAM type: NRG; PAM sequence: TGG
  source 1..20: mol_type = other DNA
tgttgctcagattggtctcc

SEQ ID NO: 8821 - DNA, 20 bp, synthetic construct
  misc_feature 1..20: note = Description of Artificial Sequence: Synthetic oligonucleotide
  misc_feature 1..20: note = Target: ANGPTL4; (-) strand; PAM type: NRG; PAM sequence: TGG
  source 1..20: mol_type = other DNA
tttcgccctgttgctcagat

SEQ ID NO: 8822 - DNA, 20 bp, synthetic construct
  misc_feature 1..20: note = Description of Artificial Sequence: Synthetic oligonucleotide
  misc_feature 1..20: note = Target: ANGPTL4; (-) strand; PAM type: NRG; PAM sequence: CAG
  source 1..20: mol_type = other DNA
caggatttcgccctgttgct

SEQ ID NO: 8823 - DNA, 20 bp, synthetic construct
  misc_feature 1..20: note = Description of Artificial Sequence: Synthetic oligonucleotide
  misc_feature 1..20: note = Target: ANGPTL4; (-) strand; PAM type: NRG; PAM sequence: AGG
  source 1..20: mol_type = other DNA
tttgtatttttaattgagac

SEQ ID NO: 8824 - DNA, 20 bp, synthetic construct
  misc_feature 1..20: note = Description of Artificial Sequence: Synthetic oligonucleotide
  misc_feature 1..20: note = Target: ANGPTL4; (-) strand; PAM type: NRG; PAM sequence: CAG
  source 1..20: mol_type = other DNA
ttttgtatttttaattgaga

SEQ ID NO: 8825 - DNA, 20 bp, synthetic construct
  misc_feature 1..20: note = Description of Artificial Sequence: Synthetic oligonucleotide
  misc_feature 1..20: note = Target: ANGPTL4; (-) strand; PAM type: NRG; PAM sequence: GAG
  source 1..20: mol_type = other DNA
agttttttgtatttttaatt

SEQ ID NO: 8826 - DNA, 20 bp, synthetic construct
  misc_feature 1..20: note = Description of Artificial Sequence: Synthetic oligonucleotide
  misc_feature 1..20: note = Target: ANGPTL4; (-) strand; PAM type: NRG; PAM sequence: TAG
  source 1..20: mol_type = other DNA
caggcaccaccatgcccagc

SEQ ID NO: 8827 - DNA, 20 bp, synthetic construct
  misc_feature 1..20: note = Description of Artificial Sequence: Synthetic oligonucleotide
  misc_feature 1..20: note = Target: ANGPTL4; (-) strand; PAM type: NRG; PAM sequence: CAG
  source 1..20: mol_type = other DNA
caggcaggcaccaccatgcc

SEQ ID NO: 8828 - DNA, 20 bp, synthetic construct
  misc_feature 1..20: note = Description of Artificial Sequence: Synthetic oligonucleotide
  misc_feature 1..20: note = Target: ANGPTL4; (-) strand; PAM type: NRG; PAM sequence: AGG
  source 1..20: mol_type = other DNA
aagtagatgggaacacaggc

SEQ ID NO: 8829 - DNA, 20 bp, synthetic construct
  misc_feature 1..20: note = Description of Artificial Sequence: Synthetic oligonucleotide
  misc_feature 1..20: note = Target: ANGPTL4; (-) strand; PAM type: NRG; PAM sequence: CAG
  source 1..20: mol_type = other DNA
caagtagatgggaacacagg

SEQ ID NO: 8830 - DNA, 20 bp, synthetic construct
  misc_feature 1..20: note = Description of Artificial Sequence: Synthetic oligonucleotide
  misc_feature 1..20: note = Target: ANGPTL4; (-) strand; PAM type: NRG; PAM sequence: AGG
  source 1..20: mol_type = other DNA
tcccaagtagatgggaacac

SEQ ID NO: 8831 - DNA, 20 bp, synthetic construct
  misc_feature 1..20: note = Description of Artificial Sequence: Synthetic oligonucleotide
  misc_feature 1..20: note = Target: ANGPTL4; (-) strand; PAM type: NRG; PAM sequence: CAG
  source 1..20: mol_type = other DNA
ctcccaagtagatgggaaca

SEQ ID NO: 8832 - DNA, 20 bp, synthetic construct
  misc_feature 1..20: note = Description of Artificial Sequence: Synthetic oligonucleotide
  misc_feature 1..20: note = Target: ANGPTL4; (-) strand; PAM type: NRG; PAM sequence: GGG
  source 1..20: mol_type = other DNA
actcagcctcccaagtagat

SEQ ID NO: 8833 - DNA, 20 bp, synthetic construct
  misc_feature 1..20: note = Description of Artificial Sequence: Synthetic oligonucleotide
  misc_feature 1..20: note = Target: ANGPTL4; (-) strand; PAM type: NRG; PAM sequence: TGG
  source 1..20: mol_type = other DNA
aactcagcctcccaagtaga

SEQ ID NO: 8834 - DNA, 20 bp, synthetic construct
  misc_feature 1..20: note = Description of Artificial Sequence: Synthetic oligonucleotide
  misc_feature 1..20: note = Target: ANGPTL4; (-) strand; PAM type: NRG; PAM sequence: TAG
  source 1..20: mol_type = other DNA
tcccaactcagcctcccaag

SEQ ID NO: 8835 - DNA, 20 bp, synthetic construct
  misc_feature 1..20: note = Description of Artificial Sequence: Synthetic oligonucleotide
  misc_feature 1..20: note = Target: ANGPTL4; (-) strand; PAM type: NRG; PAM sequence: AAG
  source 1..20: mol_type = other DNA
tcctcccaactcagcctccc

SEQ ID NO: 8836 - DNA, 20 bp, synthetic construct
  misc_feature 1..20: note = Description of Artificial Sequence: Synthetic oligonucleotide
  misc_feature 1..20: note = Target: ANGPTL4; (-) strand; PAM type: NRG; PAM sequence: CAG
  source 1..20: mol_type = other DNA
ctcaagagatcctcccaact

SEQ ID NO: 8837 - DNA, 20 bp, synthetic construct
  misc_feature 1..20: note = Description of Artificial Sequence: Synthetic oligonucleotide
  misc_feature 1..20: note = Target: ANGPTL4; (-) strand; PAM type: NRG; PAM sequence: GAG
  source 1..20: mol_type = other DNA
gccttatctcctaggctcaa

SEQ ID NO: 8838 - DNA, 20 bp, synthetic construct
  misc_feature 1..20: note = Description of Artificial Sequence: Synthetic oligonucleotide
  misc_feature 1..20: note = Target: ANGPTL4; (-) strand; PAM type: NRG; PAM sequence: AAG
  source 1..20: mol_type = other DNA
cagccttatctcctaggctc

SEQ ID NO: 8839 - DNA, 20 bp, synthetic construct
  misc_feature 1..20: note = Description of Artificial Sequence: Synthetic oligonucleotide
  misc_feature 1..20: note = Target: ANGPTL4; (-) strand; PAM type: NRG; PAM sequence: AGG
  source 1..20: mol_type = other DNA
tcactgcagccttatctcct

SEQ ID NO: 8840 - DNA, 20 bp, synthetic construct
  misc_feature 1..20: note = Description of Artificial Sequence: Synthetic oligonucleotide
  misc_feature 1..20: note = Target: ANGPTL4; (-) strand; PAM type: NRG; PAM sequence: TAG
  source 1..20: mol_type = other DNA
ctcactgcagccttatctcc

SEQ ID NO: 8841 - DNA, 20 bp, synthetic construct
  misc_feature 1..20: note = Description of Artificial Sequence: Synthetic oligonucleotide
  misc_feature 1..20: note = Target: ANGPTL4; (-) strand; PAM type: NRG; PAM sequence: CAG
  source 1..20: mol_type = other DNA
ggcgcagtctcagctcactg

SEQ ID NO: 8842 - DNA, 20 bp, synthetic construct
  misc_feature 1..20: note = Description of Artificial Sequence: Synthetic oligonucleotide
  misc_feature 1..20: note = Target: ANGPTL4; (-) strand; PAM type: NRG; PAM sequence: CAG
  source 1..20: mol_type = other DNA
tgagtgcagtggcgcagtct

SEQ ID NO: 8843 - DNA, 20 bp, synthetic construct
  misc_feature 1..20: note = Description of Artificial Sequence: Synthetic oligonucleotide
  misc_feature 1..20: note = Target: ANGPTL4; (-) strand; PAM type: NRG; PAM sequence: CAG
  source 1..20: mol_type = other DNA
caggcttgagtgcagtggcg

SEQ ID NO: 8844 - DNA, 20 bp, synthetic construct
  misc_feature 1..20: note = Description of Artificial Sequence: Synthetic oligonucleotide
  misc_feature 1..20: note = Target: ANGPTL4; (-) strand; PAM type: NRG; PAM sequence: TGG
  source 1..20: mol_type = other DNA
tcacccaggcttgagtgcag

SEQ ID NO: 8845 - DNA, 20 bp, synthetic construct
  misc_feature 1..20: note = Description of Artificial Sequence: Synthetic oligonucleotide
  misc_feature 1..20: note = Target: ANGPTL4; (-) strand; PAM type: NRG; PAM sequence: CAG
  source 1..20: mol_type = other DNA
ctgtcacccaggcttgagtg

SEQ ID NO: 8846 - DNA, 20 bp, synthetic construct
  misc_feature 1..20: note = Description of Artificial Sequence: Synthetic oligonucleotide
  misc_feature 1..20: note = Target: ANGPTL4; (-) strand; PAM type: NRG; PAM sequence: GAG
  source 1..20: mol_type = other DNA
tcactctgtcacccaggctt

SEQ ID NO: 8847 - DNA, 20 bp, synthetic construct
  misc_feature 1..20: note = Description of Artificial Sequence: Synthetic oligonucleotide
  misc_feature 1..20: note = Target: ANGPTL4; (-) strand; PAM type: NRG; PAM sequence: AGG
  source 1..20: mol_type = other DNA
ggggtctcactctgtcaccc

SEQ ID NO: 8848 - DNA, 20 bp, synthetic construct
  misc_feature 1..20: note = Description of Artificial Sequence: Synthetic oligonucleotide
  misc_feature 1..20: note = Target: ANGPTL4; (-) strand; PAM type: NRG; PAM sequence: CAG
  source 1..20: mol_type = other DNA
aggggtctcactctgtcacc

SEQ ID NO: 8849 - DNA, 20 bp, synthetic construct
  misc_feature 1..20: note = Description of Artificial Sequence: Synthetic oligonucleotide
  misc_feature 1..20: note = Target: ANGPTL4; (-) strand; PAM type: NRG; PAM sequence: GGG
  source 1..20: mol_type = other DNA
ttctttttcttttgaggcag

SEQ ID NO: 8850 - DNA, 20 bp, synthetic construct
  misc_feature 1..20: note = Description of Artificial Sequence: Synthetic oligonucleotide
  misc_feature 1..20: note = Target: ANGPTL4; (-) strand; PAM type: NRG; PAM sequence: GGG
  source 1..20: mol_type = other DNA
tttctttttcttttgaggca

SEQ ID NO: 8851 - DNA, 20 bp, synthetic construct
  misc_feature 1..20: note = Description of Artificial Sequence: Synthetic oligonucleotide
  misc_feature 1..20: note = Target: ANGPTL4; (-) strand; PAM type: NRG; PAM sequence: AGG
  source 1..20: mol_type = other DNA
ttttctttttcttttgaggc

SEQ ID NO: 8852 - DNA, 20 bp, synthetic construct
  misc_feature 1..20: note = Description of Artificial Sequence: Synthetic oligonucleotide
  misc_feature 1..20: note = Target: ANGPTL4; (-) strand; PAM type: NRG; PAM sequence: CAG
  source 1..20: mol_type = other DNA
tttttctttttcttttgagg

SEQ ID NO: 8853 - DNA, 20 bp, synthetic construct
  misc_feature 1..20: note = Description of Artificial Sequence: Synthetic oligonucleotide
  misc_feature 1..20: note = Target: ANGPTL4; (-) strand; PAM type: NRG; PAM sequence: AGG
  source 1..20: mol_type = other DNA
cattttttctttttcttttg

SEQ ID NO: 8854 - DNA, 20 bp, synthetic construct
  misc_feature 1..20: note = Description of Artificial Sequence: Synthetic oligonucleotide
  misc_feature 1..20: note = Target: ANGPTL4; (-) strand; PAM type: NRG; PAM sequence: GAG
  source 1..20: mol_type = other DNA
gcattttttctttttctttt

SEQ ID NO: 8855 - DNA, 20 bp, synthetic construct
  misc_feature 1..20: note = Description of Artificial Sequence: Synthetic oligonucleotide
  misc_feature 1..20: note = Target: ANGPTL4; (-) strand; PAM type: NRG; PAM sequence: GAG
  source 1..20: mol_type = other DNA
gtagctgggaccacaggtgt

SEQ ID NO: 8856 - DNA, 20 bp, synthetic construct
  misc_feature 1..20: note = Description of Artificial Sequence: Synthetic oligonucleotide
  misc_feature 1..20: note = Target: ANGPTL4; (-) strand; PAM type: NRG; PAM sequence: AGG
  source 1..20: mol_type = other DNA
tcccaagtagctgggaccac

SEQ ID NO: 8857 - DNA, 20 bp, synthetic construct
  misc_feature 1..20: note = Description of Artificial Sequence: Synthetic oligonucleotide
  misc_feature 1..20: note = Target: ANGPTL4; (-) strand; PAM type: NRG; PAM sequence: CAG
  source 1..20: mol_type = other DNA
ctcccaagtagctgggacca

SEQ ID NO: 8858 - DNA, 20 bp, synthetic construct
  misc_feature 1..20: note = Description of Artificial Sequence: Synthetic oligonucleotide
  misc_feature 1..20: note = Target: ANGPTL4; (-) strand; PAM type: NRG; PAM sequence: GGG
  source 1..20: mol_type = other DNA
cctgggcctcccaagtagct

SEQ ID NO: 8859 - DNA, 20 bp, synthetic construct
  misc_feature 1..20: note = Description of Artificial Sequence: Synthetic oligonucleotide
  misc_feature 1..20: note = Target: ANGPTL4; (-) strand; PAM type: NRG; PAM sequence: TGG
  source 1..20: mol_type = other DNA
acctgggcctcccaagtagc

SEQ ID NO: 8860 - DNA, 20 bp, synthetic construct
  misc_feature 1..20: note = Description of Artificial Sequence: Synthetic oligonucleotide
  misc_feature 1..20: note = Target: ANGPTL4; (-) strand; PAM type: NRG; PAM sequence: TAG
  source 1..20: mol_type = other DNA
ttgtacctgggcctcccaag

SEQ ID NO: 8861 - DNA, 20 bp, synthetic construct
  misc_feature 1..20: note = Description of Artificial Sequence: Synthetic oligonucleotide
  misc_feature 1..20: note = Target: ANGPTL4; (-) strand; PAM type: NRG; PAM sequence: AAG
  source 1..20: mol_type = other DNA
ttcttgtacctgggcctccc

SEQ ID NO: 8862 - DNA, 20 bp, synthetic construct
  misc_feature 1..20: note = Description of Artificial Sequence: Synthetic oligonucleotide
  misc_feature 1..20: note = Target: ANGPTL4; (-) strand; PAM type: NRG; PAM sequence: GGG
  source 1..20: mol_type = other DNA
ctcaagtgattcttgtacct

SEQ ID NO: 8863 - DNA, 20 bp, synthetic construct
  misc_feature 1..20: note = Description of Artificial Sequence: Synthetic oligonucleotide
  misc_feature 1..20: note = Target: ANGPTL4; (-) strand; PAM type: NRG; PAM sequence: TGG
  source 1..20: mol_type = other DNA
gctcaagtgattcttgtacc

SEQ ID NO: 8864 - DNA, 20 bp, synthetic construct
  misc_feature 1..20: note = Description of Artificial Sequence: Synthetic oligonucleotide
  misc_feature 1..20: note = Target: ANGPTL4; (-) strand; PAM type: NRG; PAM sequence: AAG
  source 1..20: mol_type = other DNA
agcgtcaaccttacgggctc

SEQ ID NO: 8865 - DNA, 20 bp, synthetic construct
  misc_feature 1..20: note = Description of Artificial Sequence: Synthetic oligonucleotide
  misc_feature 1..20: note = Target: ANGPTL4; (-) strand; PAM type: NRG; PAM sequence: GGG
  source 1..20: mol_type = other DNA
caatgcagcgtcaaccttac

SEQ ID NO: 8866 - DNA, 20 bp, synthetic construct
  misc_feature 1..20: note = Description of Artificial Sequence: Synthetic oligonucleotide
  misc_feature 1..20: note = Target: ANGPTL4; (-) strand; PAM type: NRG; PAM sequence: CGG
  source 1..20: mol_type = other DNA
tcaatgcagcgtcaacctta

SEQ ID NO: 8867 - DNA, 20 bp, synthetic construct
  misc_feature 1..20: note = Description of Artificial Sequence: Synthetic oligonucleotide
  misc_feature 1..20: note = Target: ANGPTL4; (-) strand; PAM type: NRG; PAM sequence: CAG
  source 1..20: mol_type = other DNA
ggtgtggtgatggctcaatg

SEQ ID NO: 8868 - DNA, 20 bp, synthetic construct
  misc_feature 1..20: note = Description of Artificial Sequence: Synthetic oligonucleotide
  misc_feature 1..20: note = Target: ANGPTL4; (-) strand; PAM type: NRG; PAM sequence: TGG
  source 1..20: mol_type = other DNA
ggagtgcagtggtgtggtga

SEQ ID NO: 8869 - DNA, 20 bp, synthetic construct
  misc_feature 1..20: note = Description of Artificial Sequence: Synthetic oligonucleotide
  misc_feature 1..20: note = Target: ANGPTL4; (-) strand; PAM type: NRG; PAM sequence: TGG
  source 1..20: mol_type = other DNA
caggctggagtgcagtggtg

SEQ ID NO: 8870 - DNA, 20 bp, synthetic construct
  misc_feature 1..20: note = Description of Artificial Sequence: Synthetic oligonucleotide
  misc_feature 1..20: note = Target: ANGPTL4; (-) strand; PAM type: NRG; PAM sequence: TGG
  source 1..20: mol_type = other DNA
ttgcccaggctggagtgcag

SEQ ID NO: 8871 - DNA, 20 bp, synthetic construct
  misc_feature 1..20: note = Description of Artificial Sequence: Synthetic oligonucleotide
  misc_feature 1..20: note = Target: ANGPTL4; (-) strand; PAM type: NRG; PAM sequence: CAG
  source 1..20: mol_type = other DNA
ccattgcccaggctggagtg

SEQ ID NO: 8872 - DNA, 20 bp, synthetic construct
  misc_feature 1..20: note = Description of Artificial Sequence: Synthetic oligonucleotide
  misc_feature 1..20: note = Target: ANGPTL4; (-) strand; PAM type: NRG; PAM sequence: GAG
  source 1..20: mol_type = other DNA
tggctccattgcccaggctg

SEQ ID NO: 8873 - DNA, 20 bp, synthetic construct
  misc_feature 1..20: note = Description of Artificial Sequence: Synthetic oligonucleotide
  misc_feature 1..20: note = Target: ANGPTL4; (-) strand; PAM type: NRG; PAM sequence: TGG
  source 1..20: mol_type = other DNA
cctggctccattgcccaggc

SEQ ID NO: 8874 - DNA, 20 bp, synthetic construct
  misc_feature 1..20: note = Description of Artificial Sequence: Synthetic oligonucleotide
  misc_feature 1..20: note = Target: ANGPTL4; (-) strand; PAM type: NRG; PAM sequence: AGG
  source 1..20: mol_type = other DNA
agggcctggctccattgccc

SEQ ID NO: 8875 - DNA, 20 bp, synthetic construct
  misc_feature 1..20: note = Description of Artificial Sequence: Synthetic oligonucleotide
  misc_feature 1..20: note = Target: ANGPTL4; (-) strand; PAM type: NRG; PAM sequence: CAG
  source 1..20: mol_type = other DNA
cagggcctggctccattgcc

SEQ ID NO: 8876 - DNA, 20 bp, synthetic construct
  misc_feature 1..20: note = Description of Artificial Sequence: Synthetic oligonucleotide
  misc_feature 1..20: note = Target: ANGPTL4; (-) strand; PAM type: NRG; PAM sequence: TGG
  source 1..20: mol_type = other DNA
attttttttgagacagggcc

SEQ ID NO: 8877 - DNA, 20 bp, synthetic construct
  misc_feature 1..20: note = Description of Artificial Sequence: Synthetic oligonucleotide
  misc_feature 1..20: note = Target: ANGPTL4; (-) strand; PAM type: NRG; PAM sequence: GGG
  source 1..20: mol_type = other DNA
aaacaattttttttgagaca

SEQ ID NO: 8878 - DNA, 20 bp, synthetic construct
  misc_feature 1..20: note = Description of Artificial Sequence: Synthetic oligonucleotide
  misc_feature 1..20: note = Target: ANGPTL4; (-) strand; PAM type: NRG; PAM sequence: AGG
  source 1..20: mol_type = other DNA
aaaacaattttttttgagac

SEQ ID NO: 8879 - DNA, 20 bp, synthetic construct
  misc_feature 1..20: note = Description of Artificial Sequence: Synthetic oligonucleotide
  misc_feature 1..20: note = Target: ANGPTL4; (-) strand; PAM type: NRG; PAM sequence: CAG
  source 1..20: mol_type = other DNA
aaaaacaattttttttgaga

SEQ ID NO: 8880 - DNA, 20 bp, synthetic construct
  misc_feature 1..20: note = Description of Artificial Sequence: Synthetic oligonucleotide
  misc_feature 1..20: note = Target: ANGPTL4; (-) strand; PAM type: NRG; PAM sequence: GAG
  source 1..20: mol_type = other DNA
gtttaaaaacaatttttttt

SEQ ID NO: 8881 - DNA, 20 bp, synthetic construct
  misc_feature 1..20: note = Description of Artificial Sequence: Synthetic oligonucleotide
  misc_feature 1..20: note = Target: ANGPTL4; (-) strand; PAM type: NRG; PAM sequence: AAG
  source 1..20: mol_type = other DNA
ccacacccggccttattttt

SEQ ID NO: 8882 - DNA, 20 bp, synthetic construct
  misc_feature 1..20: note = Description of Artificial Sequence: Synthetic oligonucleotide
  misc_feature 1..20: note = Target: ANGPTL4; (-) strand; PAM type: NRG; PAM sequence: CGG
  source 1..20: mol_type = other DNA
caggtgtgagcccccacacc

SEQ ID NO: 8883 - DNA, 20 bp, synthetic construct
  misc_feature 1..20: note = Description of Artificial Sequence: Synthetic oligonucleotide
  misc_feature 1..20: note = Target: ANGPTL4; (-) strand; PAM type: NRG; PAM sequence: GAG
  source 1..20: mol_type = other DNA
agtgctgggattacaggtgt

SEQ ID NO: 8884 - DNA, 20 bp, synthetic construct
  misc_feature 1..20: note = Description of Artificial Sequence: Synthetic oligonucleotide
  misc_feature 1..20: note = Target: ANGPTL4; (-) strand; PAM type: NRG; PAM sequence: AGG
  source 1..20: mol_type = other DNA
tcccaaagtgctgggattac

SEQ ID NO: 8885 - DNA, 20 bp, synthetic construct
  misc_feature 1..20: note = Description of Artificial Sequence: Synthetic oligonucleotide
  misc_feature 1..20: note = Target: ANGPTL4; (-) strand; PAM type: NRG; PAM sequence: CAG
  source 1..20: mol_type = other DNA
ctcccaaagtgctgggatta

SEQ ID NO: 8886 - DNA, 20 bp, synthetic construct
  misc_feature 1..20: note = Description of Artificial Sequence: Synthetic oligonucleotide
  misc_feature 1..20: note = Target: ANGPTL4; (-) strand; PAM type: NRG; PAM sequence: GGG
  source 1..20: mol_type = other DNA
cctcggcctcccaaagtgct

SEQ ID NO: 8887 - DNA, 20 bp, synthetic construct
  misc_feature 1..20: note = Description of Artificial Sequence: Synthetic oligonucleotide
  misc_feature 1..20: note = Target: ANGPTL4; (-) strand; PAM type: NRG; PAM sequence: TGG
  source 1..20: mol_type = other DNA
acctcggcctcccaaagtgc

SEQ ID NO: 8888 - DNA, 20 bp, synthetic construct
  misc_feature 1..20: note = Description of Artificial Sequence: Synthetic oligonucleotide
  misc_feature 1..20: note = Target: ANGPTL4; (-) strand; PAM type: NRG; PAM sequence: AAG
  source 1..20: mol_type = other DNA
ccacccacctcggcctccca

SEQ ID NO: 8889 - DNA, 20 bp, synthetic construct
  misc_feature 1..20: note = Description of Artificial Sequence: Synthetic oligonucleotide
  misc_feature 1..20: note = Target: ANGPTL4; (-) strand; PAM type: NRG; PAM sequence: CGG
  source 1..20: mol_type = other DNA
ctcaggtgatccacccacct

SEQ ID NO: 8890 - DNA, 20 bp, synthetic construct
  misc_feature 1..20: note = Description of Artificial Sequence: Synthetic oligonucleotide
  misc_feature 1..20: note = Target: ANGPTL4; (-) strand; PAM type: NRG; PAM sequence: AGG
  source 1..20: mol_type = other DNA
agttttgaactcctgacctc

SEQ ID NO: 8891 - DNA, 20 bp, synthetic construct
  misc_feature 1..20: note = Description of Artificial Sequence: Synthetic oligonucleotide
  misc_feature 1..20: note = Target: ANGPTL4; (-) strand; PAM type: NRG; PAM sequence: CAG
  source 1..20: mol_type = other DNA
tagttttgaactcctgacct

SEQ ID NO: 8892 - DNA, 20 bp, synthetic construct
  misc_feature 1..20: note = Description of Artificial Sequence: Synthetic oligonucleotide
  misc_feature 1..20: note = Target: ANGPTL4; (-) strand; PAM type: NRG; PAM sequence: TAG
  source 1..20: mol_type = other DNA
tttcaccatgttggccaggc

SEQ ID NO: 8893 - DNA, 20 bp, synthetic construct
  misc_feature 1..20: note = Description of Artificial Sequence: Synthetic oligonucleotide
  misc_feature 1..20: note = Target: ANGPTL4; (-) strand; PAM type: NRG; PAM sequence: AGG
  source 1..20: mol_type = other DNA
agggtttcaccatgttggcc

SEQ ID NO: 8894 - DNA, 20 bp, synthetic construct
  misc_feature 1..20: note = Description of Artificial Sequence: Synthetic oligonucleotide
  misc_feature 1..20: note = Target: ANGPTL4; (-) strand; PAM type: NRG; PAM sequence: CAG
  source 1..20: mol_type = other DNA
cagggtttcaccatgttggc

SEQ ID NO: 8895 - DNA, 20 bp, synthetic construct
  misc_feature 1..20: note = Description of Artificial Sequence: Synthetic oligonucleotide
  misc_feature 1..20: note = Target: ANGPTL4; (-) strand; PAM type: NRG; PAM sequence: TGG
  source 1..20: mol_type = other DNA
gagacagggtttcaccatgt

SEQ ID NO: 8896 - DNA, 20 bp, synthetic construct
  misc_feature 1..20: note = Description of Artificial Sequence: Synthetic oligonucleotide
  misc_feature 1..20: note = Target: ANGPTL4; (-) strand; PAM type: NRG; PAM sequence: GGG
  source 1..20: mol_type = other DNA
ttgtatttttagtagagaca

SEQ ID NO: 8897 - DNA, 20 bp, synthetic construct
  misc_feature 1..20: note = Description of Artificial Sequence: Synthetic oligonucleotide
  misc_feature 1..20: note = Target: ANGPTL4; (-) strand; PAM type: NRG; PAM sequence: AGG
  source 1..20: mol_type = other DNA
tttgtatttttagtagagac

SEQ ID NO: 8898 - DNA, 20 bp, synthetic construct
  misc_feature 1..20: note = Description of Artificial Sequence: Synthetic oligonucleotide
  misc_feature 1..20: note = Target: ANGPTL4; (-) strand; PAM type: NRG; PAM sequence: CAG
  source 1..20: mol_type = other DNA
ttttgtatttttagtagaga

SEQ ID NO: 8899 - DNA, 20 bp, synthetic construct
  misc_feature 1..20: note = Description of Artificial Sequence: Synthetic oligonucleotide
  misc_feature 1..20: note = Target: ANGPTL4; (-) strand; PAM type: NRG; PAM sequence: GAG
  source 1..20: mol_type = other DNA
taatttttgtatttttagta

SEQ ID NO: 8900 - DNA, 20 bp, synthetic construct
  misc_feature 1..20: note = Description of Artificial Sequence: Synthetic oligonucleotide
  misc_feature 1..20: note = Target: ANGPTL4; (-) strand; PAM type: NRG; PAM sequence: TAG
  source 1..20: mol_type = other DNA
cctaatttttgtatttttag

SEQ ID NO: 8901 - DNA, 20 bp, synthetic construct
  misc_feature 1..20: note = Description of Artificial Sequence: Synthetic oligonucleotide
  misc_feature 1..20: note = Target: ANGPTL4; (-) strand; PAM type: NRG; PAM sequence: TAG
  source 1..20: mol_type = other DNA
tggcctaatttttgtatttt

SEQ ID NO: 8902 - DNA, 20 bp, synthetic construct
  misc_feature 1..20: note = Description of Artificial Sequence: Synthetic oligonucleotide
  misc_feature 1..20: note = Target: ANGPTL4; (-) strand; PAM type: NRG; PAM sequence: TGG
  source 1..20: mol_type = other DNA
caggtatgacccactgcgcc

SEQ ID NO: 8903 - DNA, 20 bp, synthetic construct
  misc_feature 1..20: note = Description of Artificial Sequence: Synthetic oligonucleotide
  misc_feature 1..20: note = Target: ANGPTL4; (-) strand; PAM type: NRG; PAM sequence: AGG
  source 1..20: mol_type = other DNA
tcccaaagtgctgggattac

SEQ ID NO: 8904 - DNA, 20 bp, synthetic construct
  misc_feature 1..20: note = Description of Artificial Sequence: Synthetic oligonucleotide
  misc_feature 1..20: note = Target: ANGPTL4; (-) strand; PAM type: NRG; PAM sequence: CAG
  source 1..20: mol_type = other DNA
ctcccaaagtgctgggatta

SEQ ID NO: 8905 - DNA, 20 bp, synthetic construct
  misc_feature 1..20: note = Description of Artificial Sequence: Synthetic oligonucleotide
  misc_feature 1..20: note = Target: ANGPTL4; (-) strand; PAM type: NRG; PAM sequence: GGG
  source 1..20: mol_type = other DNA
cctcagcctcccaaagtgct

SEQ ID NO: 8906 - DNA, 20 bp, synthetic construct
  misc_feature 1..20: note = Description of Artificial Sequence: Synthetic oligonucleotide
  misc_feature 1..20: note = Target: ANGPTL4; (-) strand; PAM type: NRG; PAM sequence: TGG
  source 1..20: mol_type = other DNA
tcctcagcctcccaaagtgc

SEQ ID NO: 8907 - DNA, 20 bp, synthetic construct
  misc_feature 1..20: note = Description of Artificial Sequence: Synthetic oligonucleotide
  misc_feature 1..20: note = Target: ANGPTL4; (-) strand; PAM type: NRG; PAM sequence: AAG
  source 1..20: mol_type = other DNA
ccaccctcctcagcctccca

SEQ ID NO: 8908 - DNA, 20 bp, synthetic construct
  misc_feature 1..20: note = Description of Artificial Sequence: Synthetic oligonucleotide
  misc_feature 1..20: note = Target: ANGPTL4; (-) strand; PAM type: NRG; PAM sequence: CAG
  source 1..20: mol_type = other DNA
ctcatgtgatccaccctcct

SEQ ID NO: 8909 - DNA, 20 bp, synthetic construct
  misc_feature 1..20: note = Description of Artificial Sequence: Synthetic oligonucleotide
  misc_feature 1..20: note = Target: ANGPTL4; (-) strand; PAM type: NRG; PAM sequence: TGG
  source 1..20: mol_type = other DNA
tttcaccatgttggccaggt

SEQ ID NO: 8910 - DNA, 20 bp, synthetic construct
  misc_feature 1..20: note = Description of Artificial Sequence: Synthetic oligonucleotide
  misc_feature 1..20: note = Target: ANGPTL4; (-) strand; PAM type: NRG; PAM sequence: AGG
  source 1..20: mol_type = other DNA
ggggtttcaccatgttggcc

SEQ ID NO: 8911 - DNA, 20 bp, synthetic construct
  misc_feature 1..20: note = Description of Artificial Sequence: Synthetic oligonucleotide
  misc_feature 1..20: note = Target: ANGPTL4; (-) strand; PAM type: NRG; PAM sequence: CAG
  source 1..20: mol_type = other DNA
gggggtttcaccatgttggc

SEQ ID NO: 8912 - DNA, 20 bp, synthetic construct
  misc_feature 1..20: note = Description of Artificial Sequence: Synthetic oligonucleotide
  misc_feature 1..20: note = Target: ANGPTL4; (-) strand; PAM type: NRG; PAM sequence: TGG
  source 1..20: mol_type = other DNA
gtgagggggtttcaccatgt

SEQ ID NO: 8913 - DNA, 20 bp, synthetic construct
  misc_feature 1..20: note = Description of Artificial Sequence: Synthetic oligonucleotide
  misc_feature 1..20: note = Target: ANGPTL4; (-) strand; PAM type: NRG; PAM sequence: GGG
  source 1..20: mol_type = other DNA
ttgtatttttagtagtgagg

SEQ ID NO: 8914 - DNA, 20 bp, synthetic construct
  misc_feature 1..20: note = Description of Artificial Sequence: Synthetic oligonucleotide
  misc_feature 1..20: note = Target: ANGPTL4; (-) strand; PAM type: NRG; PAM sequence: GGG
  source 1..20: mol_type = other DNA
tttgtatttttagtagtgag

SEQ ID NO: 8915 - DNA, 20 bp, synthetic construct
  misc_feature 1..20: note = Description of Artificial Sequence: Synthetic oligonucleotide
  misc_feature 1..20: note = Target: ANGPTL4; (-) strand; PAM type: NRG; PAM sequence: GGG
  source 1..20: mol_type = other DNA
ttttgtatttttagtagtga

SEQ ID NO: 8916 - DNA, 20 bp, synthetic construct
  misc_feature 1..20: note = Description of Artificial Sequence: Synthetic oligonucleotide
  misc_feature 1..20: note = Target: ANGPTL4; (-) strand; PAM type: NRG; PAM sequence: AGG
  source 1..20: mol_type = other DNA
tttttgtatttttagtagtg

SEQ ID NO: 8917 - DNA, 20 bp, synthetic construct
  misc_feature 1..20: note = Description of Artificial Sequence: Synthetic oligonucleotide
  misc_feature 1..20: note = Target: ANGPTL4; (-) strand; PAM type: NRG; PAM sequence: GAG
  source 1..20: mol_type = other DNA
gtttttgtatttttagtagt

SEQ ID NO: 8918 - DNA, 20 bp, synthetic construct
  misc_feature 1..20: note = Description of Artificial Sequence: Synthetic oligonucleotide
  misc_feature 1..20: note = Target: ANGPTL4; (-) strand; PAM type: NRG; PAM sequence: TAG
  source 1..20: mol_type = other DNA
gctagtttttgtatttttag

SEQ ID NO: 8919 - DNA, 20 bp, synthetic construct
  misc_feature 1..20: note = Description of Artificial Sequence: Synthetic oligonucleotide
  misc_feature 1..20: note = Target: ANGPTL4; (-) strand; PAM type: NRG; PAM sequence: TAG
  source 1..20: mol_type = other DNA
ctggctagtttttgtatttt

SEQ ID NO: 8920 - DNA, 20 bp, synthetic construct
  misc_feature 1..20: note = Description of Artificial Sequence: Synthetic oligonucleotide
  misc_feature 1..20: note = Target: ANGPTL4; (-) strand; PAM type: NRG; PAM sequence: TAG
  source 1..20: mol_type = other DNA
cacccgccaccacgcctggc

SEQ ID NO: 8921 - DNA, 20 bp, synthetic construct
  misc_feature 1..20: note = Description of Artificial Sequence: Synthetic oligonucleotide
  misc_feature 1..20: note = Target: ANGPTL4; (-) strand; PAM type: NRG; PAM sequence: TGG
  source 1..20: mol_type = other DNA
caggcacccgccaccacgcc

SEQ ID NO: 8922 - DNA, 20 bp, synthetic construct
  misc_feature 1..20: note = Description of Artificial Sequence: Synthetic oligonucleotide
  misc_feature 1..20: note = Target: ANGPTL4; (-) strand; PAM type: NRG; PAM sequence: AGG
  source 1..20: mol_type = other DNA
tcctgagtagccgggattac

SEQ ID NO: 8923 - DNA, 20 bp, synthetic construct
  misc_feature 1..20: note = Description of Artificial Sequence: Synthetic oligonucleotide
  misc_feature 1..20: note = Target: ANGPTL4; (-) strand; PAM type: NRG; PAM sequence: CAG
  source 1..20: mol_type = other DNA
ctcctgagtagccgggatta

SEQ ID NO: 8924 - DNA, 20 bp, synthetic construct
  misc_feature 1..20: note = Description of Artificial Sequence: Synthetic oligonucleotide
  misc_feature 1..20: note = Target: ANGPTL4; (-) strand; PAM type: NRG; PAM sequence: GGG
  source 1..20: mol_type = other DNA
cctcagcctcctgagtagcc

SEQ ID NO: 8925 - DNA, 20 bp, synthetic construct
  misc_feature 1..20: note = Description of Artificial Sequence: Synthetic oligonucleotide
  misc_feature 1..20: note = Target: ANGPTL4; (-) strand; PAM type: NRG; PAM sequence: CGG
  source 1..20: mol_type = other DNA
gcctcagcctcctgagtagc

SEQ ID NO: 8926 - DNA, 20 bp, synthetic construct
  misc_feature 1..20: note = Description of Artificial Sequence: Synthetic oligonucleotide
  misc_feature 1..20: note = Target: ANGPTL4; (-) strand; PAM type: NRG; PAM sequence: TAG
  source 1..20: mol_type = other DNA
tcatgcctcagcctcctgag

SEQ ID NO: 8927 - DNA, 20 bp, synthetic construct
  misc_feature 1..20: note = Description of Artificial Sequence: Synthetic oligonucleotide
  misc_feature 1..20: note = Target: ANGPTL4; (-) strand; PAM type: NRG; PAM sequence: GAG
  source 1..20: mol_type = other DNA
ttctcatgcctcagcctcct

SEQ ID NO: 8928 - DNA, 20 bp, synthetic construct
  misc_feature 1..20: note = Description of Artificial Sequence: Synthetic oligonucleotide
  misc_feature 1..20: note = Target: ANGPTL4; (-) strand; PAM type: NRG; PAM sequence: CAG
  source 1..20: mol_type = other DNA
ttcaagggattctcatgcct

SEQ ID NO: 8929 - DNA, 20 bp, synthetic construct
  misc_feature 1..20: note = Description of Artificial Sequence: Synthetic oligonucleotide
  misc_feature 1..20: note = Target: ANGPTL4; (-) strand; PAM type: NRG; PAM sequence: GGG
  source 1..20: mol_type = other DNA
cctctgcctcccaggttcaa

SEQ ID NO: 8930 - DNA, 20 bp, synthetic construct
  misc_feature 1..20: note = Description of Artificial Sequence: Synthetic oligonucleotide
  misc_feature 1..20: note = Target: ANGPTL4; (-) strand; PAM type: NRG; PAM sequence: AGG
  source 1..20: mol_type = other DNA
acctctgcctcccaggttca

SEQ ID NO: 8931 - DNA, 20 bp, synthetic construct
  misc_feature 1..20: note = Description of Artificial Sequence: Synthetic oligonucleotide
  misc_feature 1..20: note = Target: ANGPTL4; (-) strand; PAM type: NRG; PAM sequence: AAG
  source 1..20: mol_type = other DNA
cacctctgcctcccaggttc

SEQ ID NO: 8932 - DNA, 20 bp, synthetic construct
  misc_feature 1..20: note = Description of Artificial Sequence: Synthetic oligonucleotide
  misc_feature 1..20: note = Target: ANGPTL4; (-) strand; PAM type: NRG; PAM sequence: AGG
  source 1..20: mol_type = other DNA
tcactgcacctctgcctccc

SEQ ID NO: 8933 - DNA, 20 bp, synthetic construct
  misc_feature 1..20: note = Description of Artificial Sequence: Synthetic oligonucleotide
  misc_feature 1..20: note = Target: ANGPTL4; (-) strand; PAM type: NRG; PAM sequence: CAG
  source 1..20: mol_type = other DNA
ctcactgcacctctgcctcc

SEQ ID NO: 8934 - DNA, 20 bp, synthetic construct
  misc_feature 1..20: note = Description of Artificial Sequence: Synthetic oligonucleotide
  misc_feature 1..20: note = Target: ANGPTL4; (-) strand; PAM type: NRG; PAM sequence: CGG
  source 1..20: mol_type = other DNA
ggagtgcagtggcacaatct

SEQ ID NO: 8935 - DNA, 20 bp, synthetic construct
  misc_feature 1..20: note = Description of Artificial Sequence: Synthetic oligonucleotide
  misc_feature 1..20: note = Target: ANGPTL4; (-) strand; PAM type: NRG; PAM sequence: TGG
  source 1..20: mol_type = other DNA
tctcccaggctggagtgcag

SEQ ID NO: 8936 - DNA, 20 bp, synthetic construct
  misc_feature 1..20: note = Description of Artificial Sequence: Synthetic oligonucleotide
  misc_feature 1..20: note = Target: ANGPTL4; (-) strand; PAM type: NRG; PAM sequence: CAG
  source 1..20: mol_type = other DNA
ctatctcccaggctggagtg

SEQ ID NO: 8937 - DNA, 20 bp, synthetic construct
  misc_feature 1..20: note = Description of Artificial Sequence: Synthetic oligonucleotide
  misc_feature 1..20: note = Target: ANGPTL4; (-) strand; PAM type: NRG; PAM sequence: GAG
  source 1..20: mol_type = other DNA
tcactctatctcccaggctg

SEQ ID NO: 8938 - DNA, 20 bp, synthetic construct
  misc_feature 1..20: note = Description of Artificial Sequence: Synthetic oligonucleotide
  misc_feature 1..20: note = Target: ANGPTL4; (-) strand; PAM type: NRG; PAM sequence: TGG
  source 1..20: mol_type = other DNA
tctcactctatctcccaggc

SEQ ID NO: 8939 - DNA, 20 bp, synthetic construct
  misc_feature 1..20: note = Description of Artificial Sequence: Synthetic oligonucleotide
  misc_feature 1..20: note = Target: ANGPTL4; (-) strand; PAM type: NRG; PAM sequence: AGG
  source 1..20: mol_type = other DNA
tgagtctcactctatctccc

SEQ ID NO: 8940 - DNA, 20 bp, synthetic construct
  misc_feature 1..20: note = Description of Artificial Sequence: Synthetic oligonucleotide
  misc_feature 1..20: note = Target: ANGPTL4; (-) strand; PAM type: NRG; PAM sequence: CAG
  source 1..20: mol_type = other DNA
ctgagtctcactctatctcc

SEQ ID NO: 8941 - DNA, 20 bp, synthetic construct
  misc_feature 1..20: note = Description of Artificial Sequence: Synthetic oligonucleotide
  misc_feature 1..20: note = Target: ANGPTL4; (-) strand; PAM type: NRG; PAM sequence: GAG
  source 1..20: mol_type = other DNA
tggtctttttttttgagact

SEQ ID NO: 8942 - DNA, 20 bp, synthetic construct
  misc_feature 1..20: note = Description of Artificial Sequence: Synthetic oligonucleotide
  misc_feature 1..20: note = Target: ANGPTL4; (-) strand; PAM type: NRG; PAM sequence: GAG
  source 1..20: mol_type = other DNA
aatttttggtcttttttttt

SEQ ID NO: 8943 - DNA, 20 bp, synthetic construct
  misc_feature 1..20: note = Description of Artificial Sequence: Synthetic oligonucleotide
  misc_feature 1..20: note = Target: ANGPTL4; (-) strand; PAM type: NRG; PAM sequence: TGG
  source 1..20: mol_type = other DNA
caccacacctggctaatttt

SEQ ID NO: 8944 - DNA, 20 bp, synthetic construct
  misc_feature 1..20: note = Description of Artificial Sequence: Synthetic oligonucleotide
  misc_feature 1..20: note = Target: ANGPTL4; (-) strand; PAM type: NRG; PAM sequence: TGG
  source 1..20: mol_type = other DNA
caggcgcctgccaccacacc

SEQ ID NO: 8945 - DNA, 20 bp, synthetic construct
  misc_feature 1..20: note = Description of Artificial Sequence: Synthetic oligonucleotide
  misc_feature 1..20: note = Target: ANGPTL4; (-) strand; PAM type: NRG; PAM sequence: AGG
  source 1..20: mol_type = other DNA
tcccgagtagctgggattac

SEQ ID NO: 8946 - DNA, 20 bp, synthetic construct
  misc_feature 1..20: note = Description of Artificial Sequence: Synthetic oligonucleotide
  misc_feature 1..20: note = Target: ANGPTL4; (-) strand; PAM type: NRG; PAM sequence: CAG
  source 1..20: mol_type = other DNA
ctcccgagtagctgggatta

SEQ ID NO: 8947 - DNA, 20 bp, synthetic construct
  misc_feature 1..20: note = Description of Artificial Sequence: Synthetic oligonucleotide
  misc_feature 1..20: note = Target: ANGPTL4; (-) strand; PAM type: NRG; PAM sequence: GGG
  source 1..20: mol_type = other DNA
cctcagcctcccgagtagct

SEQ ID NO: 8948 - DNA, 20 bp, synthetic construct
  misc_feature 1..20: note = Description of Artificial Sequence: Synthetic oligonucleotide
  misc_feature 1..20: note = Target: ANGPTL4; (-) strand; PAM type: NRG; PAM sequence: TGG
  source 1..20: mol_type = other DNA
ccctcagcctcccgagtagc

SEQ ID NO: 8949 - DNA, 20 bp, synthetic construct
  misc_feature 1..20: note = Description of Artificial Sequence: Synthetic oligonucleotide
  misc_feature 1..20: note = Target: ANGPTL4; (-) strand; PAM type: NRG; PAM sequence: TAG
  source 1..20: mol_type = other DNA
tcctccctcagcctcccgag

SEQ ID NO: 8950 - DNA, 20 bp, synthetic construct
  misc_feature 1..20: note = Description of Artificial Sequence: Synthetic oligonucleotide
  misc_feature 1..20: note = Target: ANGPTL4; (-) strand; PAM type: NRG; PAM sequence: GAG
  source 1..20: mol_type = other DNA
ttctcctccctcagcctccc

SEQ ID NO: 8951 - DNA, 20 bp, synthetic construct
  misc_feature 1..20: note = Description of Artificial Sequence: Synthetic oligonucleotide
  misc_feature 1..20: note = Target: ANGPTL4; (-) strand; PAM type: NRG; PAM sequence: CAG
  source 1..20: mol_type = other DNA
tttaagtgattctcctccct

SEQ ID NO: 8952 - DNA, 20 bp, synthetic construct
  misc_feature 1..20: note = Description of Artificial Sequence: Synthetic oligonucleotide
  misc_feature 1..20: note = Target: ANGPTL4; (-) strand; PAM type: NRG; PAM sequence: AAG
  source 1..20: mol_type = other DNA
aacctccgtctctcaggttt

SEQ ID NO: 8953 - DNA, 20 bp, synthetic construct
  misc_feature 1..20: note = Description of Artificial Sequence: Synthetic oligonucleotide
  misc_feature 1..20: note = Target: ANGPTL4; (-) strand; PAM type: NRG; PAM sequence: AGG
  source 1..20: mol_type = other DNA
cactgcaacctccgtctctc

SEQ ID NO: 8954 - DNA, 20 bp, synthetic construct
  misc_feature 1..20: note = Description of Artificial Sequence: Synthetic oligonucleotide
  misc_feature 1..20: note = Target: ANGPTL4; (-) strand; PAM type: NRG; PAM sequence: CAG
  source 1..20: mol_type = other DNA
tcactgcaacctccgtctct

SEQ ID NO: 8955 - DNA, 20 bp, synthetic construct
  misc_feature 1..20: note = Description of Artificial Sequence: Synthetic oligonucleotide
  misc_feature 1..20: note = Target: ANGPTL4; (-) strand; PAM type: NRG; PAM sequence: CAG
  source 1..20: mol_type = other DNA
ggagtgcagtggtgcgatct

SEQ ID NO: 8956 - DNA, 20 bp, synthetic construct
  misc_feature 1..20: note = Description of Artificial Sequence: Synthetic oligonucleotide
  misc_feature 1..20: note = Target: ANGPTL4; (-) strand; PAM type: NRG; PAM sequence: TGG
  source 1..20: mol_type = other DNA
tcacccaggctggagtgcag

SEQ ID NO: 8957 - DNA, 20 bp, synthetic construct
  misc_feature 1..20: note = Description of Artificial Sequence: Synthetic oligonucleotide
  misc_feature 1..20: note = Target: ANGPTL4; (-) strand; PAM type: NRG; PAM sequence: CAG
  source 1..20: mol_type = other DNA
ctgtcacccaggctggagtg

SEQ ID NO: 8958 - DNA, 20 bp, synthetic construct
  misc_feature 1..20: note = Description of Artificial Sequence: Synthetic oligonucleotide
  misc_feature 1..20: note = Target: ANGPTL4; (-) strand; PAM type: NRG; PAM sequence: GAG
  source 1..20: mol_type = other DNA
ttactctgtcacccaggctg

SEQ ID NO: 8959 - DNA, 20 bp, synthetic construct
  misc_feature 1..20: note = Description of Artificial Sequence: Synthetic oligonucleotide
  misc_feature 1..20: note = Target: ANGPTL4; (-) strand; PAM type: NRG; PAM sequence: TGG
  source 1..20: mol_type = other DNA
tcttactctgtcacccaggc

SEQ ID NO: 8960 - DNA, 20 bp, synthetic construct
  misc_feature 1..20: note = Description of Artificial Sequence: Synthetic oligonucleotide
  misc_feature 1..20: note = Target: ANGPTL4; (-) strand; PAM type: NRG; PAM sequence: AGG
  source 1..20: mol_type = other DNA
tgagtcttactctgtcaccc

SEQ ID NO: 8961 - DNA, 20 bp, synthetic construct
  misc_feature 1..20: note = Description of Artificial Sequence: Synthetic oligonucleotide
  misc_feature 1..20: note = Target: ANGPTL4; (-) strand; PAM type: NRG; PAM sequence: CAG
  source 1..20: mol_type = other DNA
ttgagtcttactctgtcacc

SEQ ID NO: 8962 - DNA, 20 bp, synthetic construct
  misc_feature 1..20: note = Description of Artificial Sequence: Synthetic oligonucleotide
  misc_feature 1..20: note = Target: ANGPTL4; (-) strand; PAM type: NRG; PAM sequence: GAG
  source 1..20: mol_type = other DNA
acttttttttttttgagatt

SEQ ID NO: 8963 - DNA, 20 bp, synthetic construct
  misc_feature 1..20: note = Description of Artificial Sequence: Synthetic oligonucleotide
  misc_feature 1..20: note = Target: ANGPTL4; (-) strand; PAM type: NRG; PAM sequence: GAG
  source 1..20: mol_type = other DNA
gacttgactttttttttttt

SEQ ID NO: 8964 - DNA, 20 bp, synthetic construct
  misc_feature 1..20: note = Description of Artificial Sequence: Synthetic oligonucleotide
  misc_feature 1..20: note = Target: ANGPTL4; (-) strand; PAM type: NRG; PAM sequence: TGG
  source 1..20: mol_type = other DNA
ttggggaccaggctgggctt

SEQ ID NO: 8965 - DNA, 20 bp, synthetic construct
  misc_feature 1..20: note = Description of Artificial Sequence: Synthetic oligonucleotide
  misc_feature 1..20: note = Target: ANGPTL4; (-) strand; PAM type: NRG; PAM sequence: GGG
  source 1..20: mol_type = other DNA
ggcaggttggggaccaggct

SEQ ID NO: 8966 - DNA, 20 bp, synthetic construct
  misc_feature 1..20: note = Description of Artificial Sequence: Synthetic oligonucleotide
  misc_feature 1..20: note = Target: ANGPTL4; (-) strand; PAM type: NRG; PAM sequence: TGG
  source 1..20: mol_type = other DNA
aggcaggttggggaccaggc

SEQ ID NO: 8967 - DNA, 20 bp, synthetic construct
  misc_feature 1..20: note = Description of Artificial Sequence: Synthetic oligonucleotide
  misc_feature 1..20: note = Target: ANGPTL4; (-) strand; PAM type: NRG; PAM sequence: AGG
  source 1..20: mol_type = other DNA
gatgaggcaggttggggacc

SEQ ID NO: 8968 - DNA, 20 bp, synthetic construct
  misc_feature 1..20: note = Description of Artificial Sequence: Synthetic oligonucleotide
  misc_feature 1..20: note = Target: ANGPTL4; (-) strand; PAM type: NRG; PAM sequence: CAG
  source 1..20: mol_type = other DNA
ggatgaggcaggttggggac

SEQ ID NO: 8969 - DNA, 20 bp, synthetic construct
  misc_feature 1..20: note = Description of Artificial Sequence: Synthetic oligonucleotide
  misc_feature 1..20: note = Target: ANGPTL4; (-) strand; PAM type: NRG; PAM sequence: GGG
  source 1..20: mol_type = other DNA
gttgaggatgaggcaggttg

SEQ ID NO: 8970 - DNA, 20 bp, synthetic construct
  misc_feature 1..20: note = Description of Artificial Sequence: Synthetic oligonucleotide
  misc_feature 1..20: note = Target: ANGPTL4; (-) strand; PAM type: NRG; PAM sequence: GGG
  source 1..20: mol_type = other DNA
ggttgaggatgaggcaggtt

SEQ ID NO: 8971 - DNA, 20 bp, synthetic construct
  misc_feature 1..20: note = Description of Artificial Sequence: Synthetic oligonucleotide
  misc_feature 1..20: note = Target: ANGPTL4; (-) strand; PAM type: NRG; PAM sequence: TGG
  source 1..20: mol_type = other DNA
gggttgaggatgaggcaggt

SEQ ID NO: 8972 - DNA, 20 bp, synthetic construct
  misc_feature 1..20: note = Description of Artificial Sequence: Synthetic oligonucleotide
  misc_feature 1..20: note = Target: ANGPTL4; (-) strand; PAM type: NRG; PAM sequence: AGG
  source 1..20: mol_type = other DNA
gatagggttgaggatgaggc

SEQ ID NO: 8973 - DNA, 20 bp, synthetic construct
  misc_feature 1..20: note = Description of Artificial Sequence: Synthetic oligonucleotide
  misc_feature 1..20: note = Target: ANGPTL4; (-) strand; PAM type: NRG; PAM sequence: CAG
  source 1..20: mol_type = other DNA
ggatagggttgaggatgagg

SEQ ID NO: 8974 - DNA, 20 bp, synthetic construct
  misc_feature 1..20: note = Description of Artificial Sequence: Synthetic oligonucleotide
  misc_feature 1..20: note = Target: ANGPTL4; (-) strand; PAM type: NRG; PAM sequence: AGG
  source 1..20: mol_type = other DNA
tagggatagggttgaggatg

SEQ ID NO: 8975 - DNA, 20 bp, synthetic construct
  misc_feature 1..20: note = Description of Artificial Sequence: Synthetic oligonucleotide
  misc_feature 1..20: note = Target: ANGPTL4; (-) strand; PAM type: NRG; PAM sequence: GAG
  source 1..20: mol_type = other DNA
atagggatagggttgaggat

SEQ ID NO: 8976 - DNA, 20 bp, synthetic construct
  misc_feature 1..20: note = Description of Artificial Sequence: Synthetic oligonucleotide
  misc_feature 1..20: note = Target: ANGPTL4; (-) strand; PAM type: NRG; PAM sequence: AGG
  source 1..20: mol_type = other DNA
aggagatagggatagggttg

SEQ ID NO: 8977 - DNA, 20 bp, synthetic construct
  misc_feature 1..20: note = Description of Artificial Sequence: Synthetic oligonucleotide
  misc_feature 1..20: note = Target: ANGPTL4; (-) strand; PAM type: NRG; PAM sequence: GAG
  source 1..20: mol_type = other DNA
aaggagatagggatagggtt

SEQ ID NO: 8978 - DNA, 20 bp, synthetic construct
  misc_feature 1..20: note = Description of Artificial Sequence: Synthetic oligonucleotide
  misc_feature 1..20: note = Target: ANGPTL4; (-) strand; PAM type: NRG; PAM sequence: GGG
  source 1..20: mol_type = other DNA
gctgaaaggagatagggata

SEQ ID NO: 8979 - DNA, 20 bp, synthetic construct
  misc_feature 1..20: note = Description of Artificial Sequence: Synthetic oligonucleotide
  misc_feature 1..20: note = Target: ANGPTL4; (-) strand; PAM type: NRG; PAM sequence: AGG
  source 1..20: mol_type = other DNA
ggctgaaaggagatagggat

SEQ ID NO: 8980 - DNA, 20 bp, synthetic construct
  misc_feature 1..20: note = Description of Artificial Sequence: Synthetic oligonucleotide
  misc_feature 1..20: note = Target: ANGPTL4; (-) strand; PAM type: NRG; PAM sequence: TAG
  source 1..20: mol_type = other DNA
gggctgaaaggagataggga

SEQ ID NO: 8981 - DNA, 20 bp, synthetic construct
  misc_feature 1..20: note = Description of Artificial Sequence: Synthetic oligonucleotide
  misc_feature 1..20: note = Target: ANGPTL4; (-) strand; PAM type: NRG; PAM sequence: GGG
  source 1..20: mol_type = other DNA
gatggggctgaaaggagata

SEQ ID NO: 8982 - DNA, 20 bp, synthetic construct
  misc_feature 1..20: note = Description of Artificial Sequence: Synthetic oligonucleotide
  misc_feature 1..20: note = Target: ANGPTL4; (-) strand; PAM type: NRG; PAM sequence: AGG
  source 1..20: mol_type = other DNA
cgatggggctgaaaggagat

SEQ ID NO: 8983 - DNA, 20 bp, synthetic construct
  misc_feature 1..20: note = Description of Artificial Sequence: Synthetic oligonucleotide
  misc_feature 1..20: note = Target: ANGPTL4; (-) strand; PAM type: NRG; PAM sequence: TAG
  source 1..20: mol_type = other DNA
ccgatggggctgaaaggaga

SEQ ID NO: 8984 - DNA, 20 bp, synthetic construct
  misc_feature 1..20: note = Description of Artificial Sequence: Synthetic oligonucleotide
  misc_feature 1..20: note = Target: ANGPTL4; (-) strand; PAM type: NRG; PAM sequence: GAG
  source 1..20: mol_type = other DNA
gccaccgatggggctgaaag

SEQ ID NO: 8985 - DNA, 20 bp, synthetic construct
  misc_feature 1..20: note = Description of Artificial Sequence: Synthetic oligonucleotide
  misc_feature 1..20: note = Target: ANGPTL4; (-) strand; PAM type: NRG; PAM sequence: AGG
  source 1..20: mol_type = other DNA
gagccaccgatggggctgaa

SEQ ID NO: 8986 - DNA, 20 bp, synthetic construct
  misc_feature 1..20: note = Description of Artificial Sequence: Synthetic oligonucleotide
  misc_feature 1..20: note = Target: ANGPTL4; (-) strand; PAM type: NRG; PAM sequence: AAG
  source 1..20: mol_type = other DNA
tgagccaccgatggggctga

SEQ ID NO: 8987 - DNA, 20 bp, synthetic construct
  misc_feature 1..20: note = Description of Artificial Sequence: Synthetic oligonucleotide
  misc_feature 1..20: note = Target: ANGPTL4; (-) strand; PAM type: NRG; PAM sequence: GGG
  source 1..20: mol_type = other DNA
aggtctttgagccaccgatg

SEQ ID NO: 8988 - DNA, 20 bp, synthetic construct
  misc_feature 1..20: note = Description of Artificial Sequence: Synthetic oligonucleotide
  misc_feature 1..20: note = Target: ANGPTL4; (-) strand; PAM type: NRG; PAM sequence: GGG
  source 1..20: mol_type = other DNA
caggtctttgagccaccgat

SEQ ID NO: 8989 - DNA, 20 bp, synthetic construct
  misc_feature 1..20: note = Description of Artificial Sequence: Synthetic oligonucleotide
  misc_feature 1..20: note = Target: ANGPTL4; (-) strand; PAM type: NRG; PAM sequence: TGG
  source 1..20: mol_type = other DNA
tcaggtctttgagccaccga

SEQ ID NO: 8990 - DNA, 20 bp, synthetic construct
  misc_feature 1..20: note = Description of Artificial Sequence: Synthetic oligonucleotide
  misc_feature 1..20: note = Target: ANGPTL4; (-) strand; PAM type: NRG; PAM sequence: GAG
  source 1..20: mol_type = other DNA
gggaacatggtcaggtcttt

SEQ ID NO: 8991 - DNA, 20 bp, synthetic construct
  misc_feature 1..20: note = Description of Artificial Sequence: Synthetic oligonucleotide
  misc_feature 1..20: note = Target: ANGPTL4; (-) strand; PAM type: NRG; PAM sequence: AGG
  source 1..20: mol_type = other DNA
aggggagagggaacatggtc

SEQ ID NO: 8992 - DNA, 20 bp, synthetic construct
  misc_feature 1..20: note = Description of Artificial Sequence: Synthetic oligonucleotide
  misc_feature 1..20: note = Target: ANGPTL4; (-) strand; PAM type: NRG; PAM sequence: CAG
  source 1..20: mol_type = other DNA
caggggagagggaacatggt

SEQ ID NO: 8993 - DNA, 20 bp, synthetic construct
  misc_feature 1..20: note = Description of Artificial Sequence: Synthetic oligonucleotide
  misc_feature 1..20: note = Target: ANGPTL4; (-) strand; PAM type: NRG; PAM sequence: TGG
  source 1..20: mol_type = other DNA
gggtcaggggagagggaaca

SEQ ID NO: 8994 - DNA, 20 bp, synthetic construct
  misc_feature 1..20: note = Description of Artificial Sequence: Synthetic oligonucleotide
  misc_feature 1..20: note = Target: ANGPTL4; (-) strand; PAM type: NRG; PAM sequence: GGG
  source 1..20: mol_type = other DNA
cctgccggggtcaggggaga

SEQ ID NO: 8995 - DNA, 20 bp, synthetic construct
  misc_feature 1..20: note = Description of Artificial Sequence: Synthetic oligonucleotide
  misc_feature 1..20: note = Target: ANGPTL4; (-) strand; PAM type: NRG; PAM sequence: AGG
  source 1..20: mol_type = other DNA
tcctgccggggtcaggggag

SEQ ID NO: 8996 - DNA, 20 bp, synthetic construct
  misc_feature 1..20: note = Description of Artificial Sequence: Synthetic oligonucleotide
  misc_feature 1..20: note = Target: ANGPTL4; (-) strand; PAM type: NRG; PAM sequence: GAG
  source 1..20: mol_type = other DNA
ctcctgccggggtcagggga

SEQ ID NO: 8997 - DNA, 20 bp, synthetic construct
  misc_feature 1..20: note = Description of Artificial Sequence: Synthetic oligonucleotide
  misc_feature 1..20: note = Target: ANGPTL4; (-) strand; PAM type: NRG; PAM sequence: GAG
  source 1..20: mol_type = other DNA
gcctcctgccggggtcaggg

SEQ ID NO: 8998 - DNA, 20 bp, synthetic construct
  misc_feature 1..20: note = Description of Artificial Sequence: Synthetic oligonucleotide
  misc_feature 1..20: note = Target: ANGPTL4; (-) strand; PAM type: NRG; PAM sequence: GGG
  source 1..20: mol_type = other DNA
cagcctcctgccggggtcag

SEQ ID NO: 8999 - DNA, 20 bp, synthetic construct
  misc_feature 1..20: note = Description of Artificial Sequence: Synthetic oligonucleotide
  misc_feature 1..20: note = Target: ANGPTL4; (-) strand; PAM type: NRG; PAM sequence: GGG
  source 1..20: mol_type = other DNA
ccagcctcctgccggggtca

SEQ ID NO: 9000 - DNA, 20 bp, synthetic construct
  misc_feature 1..20: note = Description of Artificial Sequence: Synthetic oligonucleotide
  misc_feature 1..20: note = Target: ANGPTL4; (-) strand; PAM type: NRG; PAM sequence: AGG
  source 1..20: mol_type = other DNA
accagcctcctgccggggtc

SEQ ID NO: 9001 - DNA, 20 bp, synthetic construct
  misc_feature 1..20: note = Description of Artificial Sequence: Synthetic oligonucleotide
  misc_feature 1..20: note = Target: ANGPTL4; (-) strand; PAM type: NRG; PAM sequence: CAG
  source 1..20: mol_type = other DNA
caccagcctcctgccggggt

SEQ ID NO: 9002 - DNA, 20 bp, synthetic construct
  misc_feature 1..20: note = Description of Artificial Sequence: Synthetic oligonucleotide
  misc_feature 1..20: note = Target: ANGPTL4; (-) strand; PAM type: NRG; PAM sequence: GGG
  source 1..20: mol_type = other DNA
aaaccaccagcctcctgccg

SEQ ID NO: 9003 - DNA, 20 bp, synthetic construct
  misc_feature 1..20: note = Description of Artificial Sequence: Synthetic oligonucleotide
  misc_feature 1..20: note = Target: ANGPTL4; (-) strand; PAM type: NRG; PAM sequence: GGG
  source 1..20: mol_type = other DNA
caaaccaccagcctcctgcc

SEQ ID NO: 9004 - DNA, 20 bp, synthetic construct
  misc_feature 1..20: note = Description of Artificial Sequence: Synthetic oligonucleotide
  misc_feature 1..20: note = Target: ANGPTL4; (-) strand; PAM type: NRG; PAM sequence: CGG
  source 1..20: mol_type = other DNA
ccaaaccaccagcctcctgc

SEQ ID NO: 9005 - DNA, 20 bp, synthetic construct
  misc_feature 1..20: note = Description of Artificial Sequence: Synthetic oligonucleotide
  misc_feature 1..20: note = Target: ANGPTL4; (-) strand; PAM type: NRG; PAM sequence: CAG
  source 1..20: mol_type = other DNA
ggctgcaggtgccaaaccac

SEQ ID NO: 9006 - DNA, 20 bp, synthetic construct
  misc_feature 1..20: note = Description of Artificial Sequence: Synthetic oligonucleotide
  misc_feature 1..20: note = Target: ANGPTL4; (-) strand; PAM type: NRG; PAM sequence: AGG
  source 1..20: mol_type = other DNA
gttgaggttggaatggctgc

SEQ ID NO: 9007 - DNA, 20 bp, synthetic construct
  misc_feature 1..20: note = Description of Artificial Sequence: Synthetic oligonucleotide
  misc_feature 1..20: note = Target: ANGPTL4; (-) strand; PAM type: NRG; PAM sequence: CAG
  source 1..20: mol_type = other DNA
cgttgaggttggaatggctg

SEQ ID NO: 9008 - DNA, 20 bp, synthetic construct
  misc_feature 1..20: note = Description of Artificial Sequence: Synthetic oligonucleotide
  misc_feature 1..20: note = Target: ANGPTL4; (-) strand; PAM type: NRG; PAM sequence: TGG
  source 1..20: mol_type = other DNA
actggccgttgaggttggaa

SEQ ID NO: 9009 - DNA, 20 bp, synthetic construct
  misc_feature 1..20: note = Description of Artificial Sequence: Synthetic oligonucleotide
  misc_feature 1..20: note = Target: ANGPTL4; (-) strand; PAM type: NRG; PAM sequence: TGG
  source 1..20: mol_type = other DNA
gaagtactggccgttgaggt

SEQ ID NO: 9010 - DNA, 20 bp, synthetic construct
  misc_feature 1..20: note = Description of Artificial Sequence: Synthetic oligonucleotide
  misc_feature 1..20: note = Target: ANGPTL4; (-) strand; PAM type: NRG; PAM sequence: AGG
  source 1..20: mol_type = other DNA
agcggaagtactggccgttg

SEQ ID NO: 9011 - DNA, 20 bp, synthetic construct
  misc_feature 1..20: note = Description of Artificial Sequence: Synthetic oligonucleotide
  misc_feature 1..20: note = Target: ANGPTL4; (-) strand; PAM type: NRG; PAM sequence: GAG
  source 1..20: mol_type = other DNA
gagcggaagtactggccgtt

SEQ ID NO: 9012 - DNA, 20 bp, synthetic construct
  misc_feature 1..20: note = Description of Artificial Sequence: Synthetic oligonucleotide
  misc_feature 1..20: note = Target: ANGPTL4; (-) strand; PAM type: NRG; PAM sequence: TGG
  source 1..20: mol_type = other DNA
gtgggatggagcggaagtac

SEQ ID NO: 9013 - DNA, 20 bp, synthetic construct
  misc_feature 1..20: note = Description of Artificial Sequence: Synthetic oligonucleotide
  misc_feature 1..20: note = Target: ANGPTL4; (-) strand; PAM type: NRG; PAM sequence: AAG
  source 1..20: mol_type = other DNA
gctgctgtgggatggagcgg

SEQ ID NO: 9014 - DNA, 20 bp, synthetic construct
  misc_feature 1..20: note = Description of Artificial Sequence: Synthetic oligonucleotide
  misc_feature 1..20: note = Target: ANGPTL4; (-) strand; PAM type: NRG; PAM sequence: CGG
  source 1..20: mol_type = other DNA
gccgctgctgtgggatggag

SEQ ID NO: 9015 - DNA, 20 bp, synthetic construct
  misc_feature 1..20: note = Description of Artificial Sequence: Synthetic oligonucleotide
  misc_feature 1..20: note = Target: ANGPTL4; (-) strand; PAM type: NRG; PAM sequence: GAG
  source 1..20: mol_type = other DNA
tctgccgctgctgtgggatg

SEQ ID NO: 9016 - DNA, 20 bp, synthetic construct
  misc_feature 1..20: note = Description of Artificial Sequence: Synthetic oligonucleotide
  misc_feature 1..20: note = Target: ANGPTL4; (-) strand; PAM type: NRG; PAM sequence: TGG
  source 1..20: mol_type = other DNA
cttctgccgctgctgtggga

SEQ ID NO: 9017 - DNA, 20 bp, synthetic construct
  misc_feature 1..20: note = Description of Artificial Sequence: Synthetic oligonucleotide
  misc_feature 1..20: note = Target: ANGPTL4; (-) strand; PAM type: NRG; PAM sequence: GGG
  source 1..20: mol_type = other DNA
taagcttctgccgctgctgt

SEQ ID NO: 9018 - DNA, 20 bp, synthetic construct
  misc_feature 1..20: note = Description of Artificial Sequence: Synthetic oligonucleotide
  misc_feature 1..20: note = Target: ANGPTL4; (-) strand; PAM type: NRG; PAM sequence: TGG
  source 1..20: mol_type = other DNA
ttaagcttctgccgctgctg

SEQ ID NO: 9019 - DNA, 20 bp, synthetic construct
  misc_feature 1..20: note = Description of Artificial Sequence: Synthetic oligonucleotide
  misc_feature 1..20: note = Target: ANGPTL4; (-) strand; PAM type: NRG; PAM sequence: AAG
  source 1..20: mol_type = other DNA
ttccagaagattcccttctt

SEQ ID NO: 9020 - DNA, 20 bp, synthetic construct
  misc_feature 1..20: note = Description of Artificial Sequence: Synthetic oligonucleotide
  misc_feature 1..20: note = Target: ANGPTL4; (-) strand; PAM type: NRG; PAM sequence: AAG
  source 1..20: mol_type = other DNA
ggccccgccaggtcttccag

SEQ ID NO: 9021 - DNA, 20 bp, synthetic construct
  misc_feature 1..20: note = Description of Artificial Sequence: Synthetic oligonucleotide
  misc_feature 1..20: note = Target: ANGPTL4; (-) strand; PAM type: NRG; PAM sequence: CAG
  source 1..20: mol_type = other DNA
agcggccccgccaggtcttc

SEQ ID NO: 9022 - DNA, 20 bp, synthetic construct
  misc_feature 1..20: note = Description of Artificial Sequence: Synthetic oligonucleotide
  misc_feature 1..20: note = Target: ANGPTL4; (-) strand; PAM type: NRG; PAM sequence: AGG
  source 1..20: mol_type = other DNA
cgggtagtagcggccccgcc

SEQ ID NO: 9023 - DNA, 20 bp, synthetic construct
  misc_feature 1..20: note = Description of Artificial Sequence: Synthetic oligonucleotide
  misc_feature 1..20: note = Target: ANGPTL4; (-) strand; PAM type: NRG; PAM sequence: CAG
  source 1..20: mol_type = other DNA
gcgggtagtagcggccccgc

SEQ ID NO: 9024 - DNA, 20 bp, synthetic construct
  misc_feature 1..20: note = Description of Artificial Sequence: Synthetic oligonucleotide
  misc_feature 1..20: note = Target: ANGPTL4; (-) strand; PAM type: NRG; PAM sequence: CGG
  source 1..20: mol_type = other DNA
tggcctgcagcgggtagtag

SEQ ID NO: 9025 - DNA, 20 bp, synthetic construct
  misc_feature 1..20: note = Description of Artificial Sequence: Synthetic oligonucleotide
  misc_feature 1..20: note = Target: ANGPTL4; (-) strand; PAM type: NRG; PAM sequence: TAG
  source 1..20: mol_type = other DNA
tggtggcctgcagcgggtag

SEQ ID NO: 9026 - DNA, 20 bp, synthetic construct
  misc_feature 1..20: note = Description of Artificial Sequence: Synthetic oligonucleotide
  misc_feature 1..20: note = Target: ANGPTL4; (-) strand; PAM type: NRG; PAM sequence: TAG
  source 1..20: mol_type = other DNA
tggtggtggcctgcagcggg

SEQ ID NO: 9027 - DNA, 20 bp, synthetic construct
  misc_feature 1..20: note = Description of Artificial Sequence: Synthetic oligonucleotide
  misc_feature 1..20: note = Target: ANGPTL4; (-) strand; PAM type: NRG; PAM sequence: GGG
  source 1..20: mol_type = other DNA
acatggtggtggcctgcagc

SEQ ID NO: 9028 - DNA, 20 bp, synthetic construct
  misc_feature 1..20: note = Description of Artificial Sequence: Synthetic oligonucleotide
  misc_feature 1..20: note = Target: ANGPTL4; (-) strand; PAM type: NRG; PAM sequence: CGG
  source 1..20: mol_type = other DNA
aacatggtggtggcctgcag

SEQ ID NO: 9029 - DNA, 20 bp, synthetic construct
  misc_feature 1..20: note = Description of Artificial Sequence: Synthetic oligonucleotide
  misc_feature 1..20: note = Target: ANGPTL4; (-) strand; PAM type: NRG; PAM sequence: CAG
  source 1..20: mol_type = other DNA
atcaacatggtggtggcctg

SEQ ID NO: 9030 - DNA, 20 bp, synthetic construct
  misc_feature 1..20: note = Description of Artificial Sequence: Synthetic oligonucleotide
  misc_feature 1..20: note = Target: ANGPTL4; (-) strand; PAM type: NRG; PAM sequence: TGG
  source 1..20: mol_type = other DNA
gggctggatcaacatggtgg

SEQ ID NO: 9031 - DNA, 20 bp, synthetic construct
  misc_feature 1..20: note = Description of Artificial Sequence: Synthetic oligonucleotide
  misc_feature 1..20: note = Target: ANGPTL4; (-) strand; PAM type: NRG; PAM sequence: TGG
  source 1..20: mol_type = other DNA
catgggctggatcaacatgg

SEQ ID NO: 9032 - DNA, 20 bp, synthetic construct
  misc_feature 1..20: note = Description of Artificial Sequence: Synthetic oligonucleotide
  misc_feature 1..20: note = Target: ANGPTL4; (-) strand; PAM type: NRG; PAM sequence: TGG
  source 1..20: mol_type = other DNA
tgccatgggctggatcaaca

SEQ ID NO: 9033 - DNA, 20 bp, synthetic construct
  misc_feature 1..20: note = Description of Artificial Sequence: Synthetic oligonucleotide
  misc_feature 1..20: note = Target: ANGPTL4; (-) strand; PAM type: NRG; PAM sequence: TGG
  source 1..20: mol_type = other DNA
ctgcctctgctgccatgggc

SEQ ID NO: 9034 - DNA, 20 bp, synthetic construct
  misc_feature 1..20: note = Description of Artificial Sequence: Synthetic oligonucleotide
  misc_feature 1..20: note = Target: ANGPTL4; (-) strand; PAM type: NRG; PAM sequence: GGG
  source 1..20: mol_type = other DNA
gaggctgcctctgctgccat

SEQ ID NO: 9035 - DNA, 20 bp, synthetic construct
  misc_feature 1..20: note = Description of Artificial Sequence: Synthetic oligonucleotide
  misc_feature 1..20: note = Target: ANGPTL4; (-) strand; PAM type: NRG; PAM sequence: TGG
  source 1..20: mol_type = other DNA
ggaggctgcctctgctgcca

SEQ ID NO: 9036 - DNA, 20 bp, synthetic construct
  misc_feature 1..20: note = Description of Artificial Sequence: Synthetic oligonucleotide
  misc_feature 1..20: note = Target: ANGPTL4; (-) strand; PAM type: NRG; PAM sequence: AGG
  source 1..20: mol_type = other DNA
ggcccagccaggacgctagg

SEQ ID NO: 9037 - DNA, 20 bp, synthetic construct
  misc_feature 1..20: note = Description of Artificial Sequence: Synthetic oligonucleotide
  misc_feature 1..20: note = Target: ANGPTL4; (-) strand; PAM type: NRG; PAM sequence: GAG
  source 1..20: mol_type = other DNA
aggcccagccaggacgctag

SEQ ID NO: 9038 - DNA, 20 bp, synthetic construct
  misc_feature 1..20: note = Description of Artificial Sequence: Synthetic oligonucleotide
  misc_feature 1..20: note = Target: ANGPTL4; (-) strand; PAM type: NRG; PAM sequence: AGG
  source 1..20: mol_type = other DNA
ccaggcccagccaggacgct

SEQ ID NO: 9039 - DNA, 20 bp, synthetic construct
  misc_feature 1..20: note = Description of Artificial Sequence: Synthetic oligonucleotide
  misc_feature 1..20: note = Target: ANGPTL4; (-) strand; PAM type: NRG; PAM sequence: TAG
  source 1..20: mol_type = other DNA
accaggcccagccaggacgc

SEQ ID NO: 9040 - DNA, 20 bp, synthetic construct
  misc_feature 1..20: note = Description of Artificial Sequence: Synthetic oligonucleotide
  misc_feature 1..20: note = Target: ANGPTL4; (-) strand; PAM type: NRG; PAM sequence: AGG
  source 1..20: mol_type = other DNA
gcctgggaccaggcccagcc

SEQ ID NO: 9041 - DNA, 20 bp, synthetic construct
  misc_feature 1..20: note = Description of Artificial Sequence: Synthetic oligonucleotide
  misc_feature 1..20: note = Target: ANGPTL4; (-) strand; PAM type: NRG; PAM sequence: CAG
  source 1..20: mol_type = other DNA
ggcctgggaccaggcccagc

SEQ ID NO: 9042 - DNA, 20 bp, synthetic construct
  misc_feature 1..20: note = Description of Artificial Sequence: Synthetic oligonucleotide
  misc_feature 1..20: note = Target: ANGPTL4; (-) strand; PAM type: NRG; PAM sequence: CAG
  source 1..20: mol_type = other DNA
cgtgggcctgggaccaggcc

SEQ ID NO: 9043 - DNA, 20 bp, synthetic construct
  misc_feature 1..20: note = Description of Artificial Sequence: Synthetic oligonucleotide
  misc_feature 1..20: note = Target: ANGPTL4; (-) strand; PAM type: NRG; PAM sequence: AGG
  source 1..20: mol_type = other DNA
tctttcgtgggcctgggacc

SEQ ID NO: 9044 - DNA, 20 bp, synthetic construct
  misc_feature 1..20: note = Description of Artificial Sequence: Synthetic oligonucleotide
  misc_feature 1..20: note = Target: ANGPTL4; (-) strand; PAM type: NRG; PAM sequence: CAG
  source 1..20: mol_type = other DNA
gtctttcgtgggcctgggac

SEQ ID NO: 9045 - DNA, 20 bp, synthetic construct
  misc_feature 1..20: note = Description of Artificial Sequence: Synthetic oligonucleotide
  misc_feature 1..20: note = Target: ANGPTL4; (-) strand; PAM type: NRG; PAM sequence: GGG
  source 1..20: mol_type = other DNA
tcaccgtctttcgtgggcct

SEQ ID NO: 9046 - DNA, 20 bp, synthetic construct
  misc_feature 1..20: note = Description of Artificial Sequence: Synthetic oligonucleotide
  misc_feature 1..20: note = Target: ANGPTL4; (-) strand; PAM type: NRG; PAM sequence: TGG
  source 1..20: mol_type = other DNA
gtcaccgtctttcgtgggcc

SEQ ID NO: 9047 - DNA, 20 bp, synthetic construct
  misc_feature 1..20: note = Description of Artificial Sequence: Synthetic oligonucleotide
  misc_feature 1..20: note = Target: ANGPTL4; (-) strand; PAM type: NRG; PAM sequence: GGG
  source 1..20: mol_type = other DNA
caagagtcaccgtctttcgt

SEQ ID NO: 9048 - DNA, 20 bp, synthetic construct
  misc_feature 1..20: note = Description of Artificial Sequence: Synthetic oligonucleotide
  misc_feature 1..20: note = Target: ANGPTL4; (-) strand; PAM type: NRG; PAM sequence: TGG
  source 1..20: mol_type = other DNA
ccaagagtcaccgtctttcg

SEQ ID NO: 9049 - DNA, 20 bp, synthetic construct
  misc_feature 1..20: note = Description of Artificial Sequence: Synthetic oligonucleotide
  misc_feature 1..20: note = Target: ANGPTL4; (-) strand; PAM type: NRG; PAM sequence: GAG
  source 1..20: mol_type = other DNA
acatcctcgggcagagccaa

SEQ ID NO: 9050 - DNA, 20 bp, synthetic construct
  misc_feature 1..20: note = Description of Artificial Sequence: Synthetic oligonucleotide
  misc_feature 1..20: note = Target: ANGPTL4; (-) strand; PAM type: NRG; PAM sequence: AAG
  source 1..20: mol_type = other DNA
ccacatcctcgggcagagcc

SEQ ID NO: 9051 - DNA, 20 bp, synthetic construct
  misc_feature 1..20: note = Description of Artificial Sequence: Synthetic oligonucleotide
  misc_feature 1..20: note = Target: ANGPTL4; (-) strand; PAM type: NRG; PAM sequence: GAG
  source 1..20: mol_type = other DNA
aacggccacatcctcgggca

SEQ ID NO: 9052 - DNA, 20 bp, synthetic construct
  misc_feature 1..20: note = Description of Artificial Sequence: Synthetic oligonucleotide
  misc_feature 1..20: note = Target: ANGPTL4; (-) strand; PAM type: NRG; PAM sequence: CAG
  source 1..20: mol_type = other DNA
ggaacggccacatcctcggg

SEQ ID NO: 9053 - DNA, 20 bp, synthetic construct
  misc_feature 1..20: note = Description of Artificial Sequence: Synthetic oligonucleotide
  misc_feature 1..20: note = Target: ANGPTL4; (-) strand; PAM type: NRG; PAM sequence: GGG
  source 1..20: mol_type = other DNA
cagggaacggccacatcctc

SEQ ID NO: 9054 - DNA, 20 bp, synthetic construct
  misc_feature 1..20: note = Description of Artificial Sequence: Synthetic oligonucleotide
  misc_feature 1..20: note = Target: ANGPTL4; (-) strand; PAM type: NRG; PAM sequence: CGG
  source 1..20: mol_type = other DNA
gcagggaacggccacatcct

SEQ ID NO: 9055 - DNA, 20 bp, synthetic construct
  misc_feature 1..20: note = Description of Artificial Sequence: Synthetic oligonucleotide
  misc_feature 1..20: note = Target: ANGPTL4; (-) strand; PAM type: NRG; PAM sequence: CGG
  source 1..20: mol_type = other DNA
gcccctgcccaggcagggaa

SEQ ID NO: 9056 - DNA, 20 bp, synthetic construct
  misc_feature 1..20: note = Description of Artificial Sequence: Synthetic oligonucleotide
  misc_feature 1..20: note = Target: ANGPTL4; (-) strand; PAM type: NRG; PAM sequence: GGG
  source 1..20: mol_type = other DNA
ttggagcccctgcccaggca

SEQ ID NO: 9057 - DNA, 20 bp, synthetic construct
  misc_feature 1..20: note = Description of Artificial Sequence: Synthetic oligonucleotide
  misc_feature 1..20: note = Target: ANGPTL4; (-) strand; PAM type: NRG; PAM sequence: AGG
  source 1..20: mol_type = other DNA
cttggagcccctgcccaggc

SEQ ID NO: 9058 - DNA, 20 bp, synthetic construct
  misc_feature 1..20: note = Description of Artificial Sequence: Synthetic oligonucleotide
  misc_feature 1..20: note = Target: ANGPTL4; (-) strand; PAM type: NRG; PAM sequence: CAG
  source 1..20: mol_type = other DNA
ccttggagcccctgcccagg

SEQ ID NO: 9059 - DNA, 20 bp, synthetic construct
  misc_feature 1..20: note = Description of Artificial Sequence: Synthetic oligonucleotide
  misc_feature 1..20: note = Target: ANGPTL4; (-) strand; PAM type: NRG; PAM sequence: AGG
  source 1..20: mol_type = other DNA
cctccttggagcccctgccc

SEQ ID NO: 9060 - DNA, 20 bp, synthetic construct
  misc_feature 1..20: note = Description of Artificial Sequence: Synthetic oligonucleotide
  misc_feature 1..20: note = Target: ANGPTL4; (-) strand; PAM type: NRG; PAM sequence: CAG
  source 1..20: mol_type = other DNA
ccctccttggagcccctgcc

SEQ ID NO: 9061 - DNA, 20 bp, synthetic construct
  misc_feature 1..20: note = Description of Artificial Sequence: Synthetic oligonucleotide
  misc_feature 1..20: note = Target: ANGPTL4; (-) strand; PAM type: NRG; PAM sequence: GAG
  source 1..20: mol_type = other DNA
ttccagatggcccctccttg

SEQ ID NO: 9062 - DNA, 20 bp, synthetic construct
  misc_feature 1..20: note = Description of Artificial Sequence: Synthetic oligonucleotide
  misc_feature 1..20: note = Target: ANGPTL4; (-) strand; PAM type: NRG; PAM sequence: TGG
  source 1..20: mol_type = other DNA
gtttccagatggcccctcct

SEQ ID NO: 9063 - DNA, 20 bp, synthetic construct
  misc_feature 1..20: note = Description of Artificial Sequence: Synthetic oligonucleotide
  misc_feature 1..20: note = Target: ANGPTL4; (-) strand; PAM type: NRG; PAM sequence: TGG
  source 1..20: mol_type = other DNA
tctgtccacaagtttccaga

SEQ ID NO: 9064 - DNA, 20 bp, synthetic construct
  misc_feature 1..20: note = Description of Artificial Sequence: Synthetic oligonucleotide
  misc_feature 1..20: note = Target: ANGPTL4; (-) strand; PAM type: NRG; PAM sequence: CAG
  source 1..20: mol_type = other DNA
cttctctgtccacaagtttc

SEQ ID NO: 9065 - DNA, 20 bp, synthetic construct
  misc_feature 1..20: note = Description of Artificial Sequence: Synthetic oligonucleotide
  misc_feature 1..20: note = Target: ANGPTL4; (-) strand; PAM type: NRG; PAM sequence: AAG
  source 1..20: mol_type = other DNA
tggtcttcttctctgtccac

SEQ ID NO: 9066 - DNA, 20 bp, synthetic construct
  misc_feature 1..20: note = Description of Artificial Sequence: Synthetic oligonucleotide
  misc_feature 1..20: note = Target: ANGPTL4; (-) strand; PAM type: NRG; PAM sequence: TGG
  source 1..20: mol_type = other DNA
aaagggggcttctccagtcg

SEQ ID NO: 9067 - DNA, 20 bp, synthetic construct
  misc_feature 1..20: note = Description of Artificial Sequence: Synthetic oligonucleotide
  misc_feature 1..20: note = Target: ANGPTL4; (-) strand; PAM type: NRG; PAM sequence: CAG
  source 1..20: mol_type = other DNA
actcagaaagggggcttctc

SEQ ID NO: 9068 - DNA, 20 bp, synthetic construct
  misc_feature 1..20: note = Description of Artificial Sequence: Synthetic oligonucleotide
  misc_feature 1..20: note = Target: ANGPTL4; (-) strand; PAM type: NRG; PAM sequence: GGG
  source 1..20: mol_type = other DNA
cccccctgcactcagaaagg

SEQ ID NO: 9069 - DNA, 20 bp, synthetic construct
  misc_feature 1..20: note = Description of Artificial Sequence: Synthetic oligonucleotide
  misc_feature 1..20: note = Target: ANGPTL4; (-) strand; PAM type: NRG; PAM sequence: GGG
  source 1..20: mol_type = other DNA
gcccccctgcactcagaaag

SEQ ID NO: 9070 - DNA, 20 bp, synthetic construct
  misc_feature 1..20: note = Description of Artificial Sequence: Synthetic oligonucleotide
  misc_feature 1..20: note = Target: ANGPTL4; (-) strand; PAM type: NRG; PAM sequence: GGG
  source 1..20: mol_type = other DNA
agcccccctgcactcagaaa

SEQ ID NO: 9071 - DNA, 20 bp, synthetic construct
  misc_feature 1..20: note = Description of Artificial Sequence: Synthetic oligonucleotide
  misc_feature 1..20: note = Target: ANGPTL4; (-) strand; PAM type: NRG; PAM sequence: AGG
  source 1..20: mol_type = other DNA
cagcccccctgcactcagaa

SEQ ID NO: 9072 - DNA, 20 bp, synthetic construct
  misc_feature 1..20: note = Description of Artificial Sequence: Synthetic oligonucleotide
  misc_feature 1..20: note = Target: ANGPTL4; (-) strand; PAM type: NRG; PAM sequence: AAG
  source 1..20: mol_type = other DNA
gcagcccccctgcactcaga

SEQ ID NO: 9073 - DNA, 20 bp, synthetic construct
  misc_feature 1..20: note = Description of Artificial Sequence: Synthetic oligonucleotide
  misc_feature 1..20: note = Target: ANGPTL4; (-) strand; PAM type: NRG; PAM sequence: CAG
  source 1..20: mol_type = other DNA
gcatgcagcccccctgcact

SEQ ID NO: 9074 - DNA, 20 bp, synthetic construct
  misc_feature 1..20: note = Description of Artificial Sequence: Synthetic oligonucleotide
  misc_feature 1..20: note = Target: ANGPTL4; (-) strand; PAM type: NRG; PAM sequence: CAG
  source 1..20: mol_type = other DNA
atctcaggaggcaacgcatg

SEQ ID NO: 9075 - DNA, 20 bp, synthetic construct
  misc_feature 1..20: note = Description of Artificial Sequence: Synthetic oligonucleotide
  misc_feature 1..20: note = Target: ANGPTL4; (-) strand; PAM type: NRG; PAM sequence: AGG
  source 1..20: mol_type = other DNA
cctgcagcctcgatctcagg

SEQ ID NO: 9076 - DNA, 20 bp, synthetic construct
  misc_feature 1..20: note = Description of Artificial Sequence: Synthetic oligonucleotide
  misc_feature 1..20: note = Target: ANGPTL4; (-) strand; PAM type: NRG; PAM sequence: GAG
  source 1..20: mol_type = other DNA
tcctgcagcctcgatctcag

SEQ ID NO: 9077 - DNA, 20 bp, synthetic construct
  misc_feature 1..20: note = Description of Artificial Sequence: Synthetic oligonucleotide
  misc_feature 1..20: note = Target: ANGPTL4; (-) strand; PAM type: NRG; PAM sequence: AGG
  source 1..20: mol_type = other DNA
tatcctgcagcctcgatctc

SEQ ID NO: 9078 - DNA, 20 bp, synthetic construct
  misc_feature 1..20: note = Description of Artificial Sequence: Synthetic oligonucleotide
  misc_feature 1..20: note = Target: ANGPTL4; (-) strand; PAM type: NRG; PAM sequence: CAG
  source 1..20: mol_type = other DNA
atatcctgcagcctcgatct

SEQ ID NO: 9079 - DNA, 20 bp, synthetic construct
  misc_feature 1..20: note = Description of Artificial Sequence: Synthetic oligonucleotide
  misc_feature 1..20: note = Target: ANGPTL4; (-) strand; PAM type: NRG; PAM sequence: CAG
  source 1..20: mol_type = other DNA
tagagtctgagcatatcctg

SEQ ID NO: 9080 - DNA, 20 bp, synthetic construct
  misc_feature 1..20: note = Description of Artificial Sequence: Synthetic oligonucleotide
  misc_feature 1..20: note = Target: ANGPTL4; (-) strand; PAM type: NRG; PAM sequence: GAG
  source 1..20: mol_type = other DNA
ggtccacgcctctagagtct

SEQ ID NO: 9081 - DNA, 20 bp, synthetic construct
  misc_feature 1..20: note = Description of Artificial Sequence: Synthetic oligonucleotide
  misc_feature 1..20: note = Target: ANGPTL4; (-) strand; PAM type: NRG; PAM sequence: GAG
  source 1..20: mol_type = other DNA
ccccttggtccacgcctcta

SEQ ID NO: 9082 - DNA, 20 bp, synthetic construct
  misc_feature 1..20: note = Description of Artificial Sequence: Synthetic oligonucleotide
  misc_feature 1..20: note = Target: ANGPTL4; (-) strand; PAM type: NRG; PAM sequence: TAG
  source 1..20: mol_type = other DNA
tgccccttggtccacgcctc

SEQ ID NO: 9083 - DNA, 20 bp, synthetic construct
  misc_feature 1..20: note = Description of Artificial Sequence: Synthetic oligonucleotide
  misc_feature 1..20: note = Target: ANGPTL4; (-) strand; PAM type: NRG; PAM sequence: TGG
  source 1..20: mol_type = other DNA
gagtgaagctccatgcccct

SEQ ID NO: 9084 - DNA, 20 bp, synthetic construct
  misc_feature 1..20: note = Description of Artificial Sequence: Synthetic oligonucleotide
  misc_feature 1..20: note = Target: ANGPTL4; (-) strand; PAM type: NRG; PAM sequence: AAG
  source 1..20: mol_type = other DNA
tccctggccagcaaggagtg

SEQ ID NO: 9085 - DNA, 20 bp, synthetic construct
  misc_feature 1..20: note = Description of Artificial Sequence: Synthetic oligonucleotide
  misc_feature 1..20: note = Target: ANGPTL4; (-) strand; PAM type: NRG; PAM sequence: GAG
  source 1..20: mol_type = other DNA
ccaactccctggccagcaag

SEQ ID NO: 9086 - DNA, 20 bp, synthetic construct
  misc_feature 1..20: note = Description of Artificial Sequence: Synthetic oligonucleotide
  misc_feature 1..20: note = Target: ANGPTL4; (-) strand; PAM type: NRG; PAM sequence: AGG
  source 1..20: mol_type = other DNA
ccccaactccctggccagca

SEQ ID NO: 9087 - DNA, 20 bp, synthetic construct
  misc_feature 1..20: note = Description of Artificial Sequence: Synthetic oligonucleotide
  misc_feature 1..20: note = Target: ANGPTL4; (-) strand; PAM type: NRG; PAM sequence: AAG
  source 1..20: mol_type = other DNA
tccccaactccctggccagc

SEQ ID NO: 9088 - DNA, 20 bp, synthetic construct
  misc_feature 1..20: note = Description of Artificial Sequence: Synthetic oligonucleotide
  misc_feature 1..20: note = Target: ANGPTL4; (-) strand; PAM type: NRG; PAM sequence: CAG
  source 1..20: mol_type = other DNA
tgagtccccaactccctggc

SEQ ID NO: 9089 - DNA, 20 bp, synthetic construct
  misc_feature 1..20: note = Description of Artificial Sequence: Synthetic oligonucleotide
  misc_feature 1..20: note = Target: ANGPTL4; (-) strand; PAM type: NRG; PAM sequence: TGG
  source 1..20: mol_type = other DNA
cctctgagtccccaactccc

SEQ ID NO: 9090 - DNA, 20 bp, synthetic construct
  misc_feature 1..20: note = Description of Artificial Sequence: Synthetic oligonucleotide
  misc_feature 1..20: note = Target: ANGPTL4; (-) strand; PAM type: NRG; PAM sequence: GAG
  source 1..20: mol_type = other DNA
tggccccaagtggtccctct

SEQ ID NO: 9091 - DNA, 20 bp, synthetic construct
  misc_feature 1..20: note = Description of Artificial Sequence: Synthetic oligonucleotide
  misc_feature 1..20: note = Target: ANGPTL4; (-) strand; PAM type: NRG; PAM sequence: TGG
  source 1..20: mol_type = other DNA
ccagtctggctggccccaag

SEQ ID NO: 9092 - DNA, 20 bp, synthetic construct
  misc_feature 1..20: note = Description of Artificial Sequence: Synthetic oligonucleotide
  misc_feature 1..20: note = Target: ANGPTL4; (-) strand; PAM type: NRG; PAM sequence: AAG
  source 1..20: mol_type = other DNA
aggccagtctggctggcccc

SEQ ID NO: 9093 - DNA, 20 bp, synthetic construct
  misc_feature 1..20: note = Description of Artificial Sequence: Synthetic oligonucleotide
  misc_feature 1..20: note = Target: ANGPTL4; (-) strand; PAM type: NRG; PAM sequence: TGG
  source 1..20: mol_type = other DNA
gccattgaggccagtctggc

SEQ ID NO: 9094 - DNA, 20 bp, synthetic construct
  misc_feature 1..20: note = Description of Artificial Sequence: Synthetic oligonucleotide
  misc_feature 1..20: note = Target: ANGPTL4; (-) strand; PAM type: NRG; PAM sequence: TGG
  source 1..20: mol_type = other DNA
gtccgccattgaggccagtc

SEQ ID NO: 9095 - DNA, 20 bp, synthetic construct
  misc_feature 1..20: note = Description of Artificial Sequence: Synthetic oligonucleotide
  misc_feature 1..20: note = Target: ANGPTL4; (-) strand; PAM type: NRG; PAM sequence: CAG
  source 1..20: mol_type = other DNA
actgagtccgccattgaggc

SEQ ID NO: 9096 - DNA, 20 bp, synthetic construct
  misc_feature 1..20: note = Description of Artificial Sequence: Synthetic oligonucleotide
  misc_feature 1..20: note = Target: ANGPTL4; (-) strand; PAM type: NRG; PAM sequence: AGG
  source 1..20: mol_type = other DNA
tgtgactgagtccgccattg

SEQ ID NO: 9097 - DNA, 20 bp, synthetic construct
  misc_feature 1..20: note = Description of Artificial Sequence: Synthetic oligonucleotide
  misc_feature 1..20: note = Target: ANGPTL4; (-) strand; PAM type: NRG; PAM sequence: GAG
  source 1..20: mol_type = other DNA
atgtgactgagtccgccatt

SEQ ID NO: 9098 - DNA, 20 bp, synthetic construct
  misc_feature 1..20: note = Description of Artificial Sequence: Synthetic oligonucleotide
  misc_feature 1..20: note = Target: ANGPTL4; (-) strand; PAM type: NRG; PAM sequence: GAG
  source 1..20: mol_type = other DNA
ccccgtcagtcaatgtgact

SEQ ID NO: 9099 - DNA, 20 bp, synthetic construct
  misc_feature 1..20: note = Description of Artificial Sequence: Synthetic oligonucleotide
  misc_feature 1..20: note = Target: ANGPTL4; (-) strand; PAM type: NRG; PAM sequence: CAG
  source 1..20: mol_type = other DNA
acacaagccctggtccccgt

SEQ ID NO: 9100 - DNA, 20 bp, synthetic construct
  misc_feature 1..20: note = Description of Artificial Sequence: Synthetic oligonucleotide
  misc_feature 1..20: note = Target: ANGPTL4; (-) strand; PAM type: NRG; PAM sequence: TGG
  source 1..20: mol_type = other DNA
ctctcgacccacacaagccc

SEQ ID NO: 9101 - DNA, 20 bp, synthetic construct
  misc_feature 1..20: note = Description of Artificial Sequence: Synthetic oligonucleotide
  misc_feature 1..20: note = Target: ANGPTL4; (-) strand; PAM type: NRG; PAM sequence: AAG
  source 1..20: mol_type = other DNA
agggcgctctcgacccacac

SEQ ID NO: 9102 - DNA, 20 bp, synthetic construct
  misc_feature 1..20: note = Description of Artificial Sequence: Synthetic oligonucleotide
  misc_feature 1..20: note = Target: ANGPTL4; (-) strand; PAM type: NRG; PAM sequence: GGG
  source 1..20: mol_type = other DNA
caacagcaccagcaccatga

SEQ ID NO: 9103 - DNA, 20 bp, synthetic construct
  misc_feature 1..20: note = Description of Artificial Sequence: Synthetic oligonucleotide
  misc_feature 1..20: note = Target: ANGPTL4; (-) strand; PAM type: NRG; PAM sequence: AGG
  source 1..20: mol_type = other DNA
acaacagcaccagcaccatg

SEQ ID NO: 9104 - DNA, 20 bp, synthetic construct
  misc_feature 1..20: note = Description of Artificial Sequence: Synthetic oligonucleotide
  misc_feature 1..20: note = Target: ANGPTL4; (-) strand; PAM type: NRG; PAM sequence: GAG
  source 1..20: mol_type = other DNA
cacaacagcaccagcaccat

SEQ ID NO: 9105 - DNA, 20 bp, synthetic construct
  misc_feature 1..20: note = Description of Artificial Sequence: Synthetic oligonucleotide
  misc_feature 1..20: note = Target: ANGPTL4; (-) strand; PAM type: NRG; PAM sequence: CAG
  source 1..20: mol_type = other DNA
ggacctacacacaacagcac

SEQ ID NO: 9106 - DNA, 20 bp, synthetic construct
  misc_feature 1..20: note = Description of Artificial Sequence: Synthetic oligonucleotide
  misc_feature 1..20: note = Target: ANGPTL4; (-) strand; PAM type: NRG; PAM sequence: CAG
  source 1..20: mol_type = other DNA
cccaggggacctacacacaa

SEQ ID NO: 9107 - DNA, 20 bp, synthetic construct
  misc_feature 1..20: note = Description of Artificial Sequence: Synthetic oligonucleotide
  misc_feature 1..20: note = Target: ANGPTL4; (-) strand; PAM type: NRG; PAM sequence: GGG
  source 1..20: mol_type = other DNA
gcgcctgcttgtgtccccag

SEQ ID NO: 9108 - DNA, 20 bp, synthetic construct
  misc_feature 1..20: note = Description of Artificial Sequence: Synthetic oligonucleotide
  misc_feature 1..20: note = Target: ANGPTL4; (-) strand; PAM type: NRG; PAM sequence: GGG
  source 1..20: mol_type = other DNA
ggcgcctgcttgtgtcccca

SEQ ID NO: 9109 - DNA, 20 bp, synthetic construct
  misc_feature 1..20: note = Description of Artificial Sequence: Synthetic oligonucleotide
  misc_feature 1..20: note = Target: ANGPTL4; (-) strand; PAM type: NRG; PAM sequence: AGG
  source 1..20: mol_type = other DNA
tggcgcctgcttgtgtcccc

SEQ ID NO: 9110 - DNA, 20 bp, synthetic construct
  misc_feature 1..20: note = Description of Artificial Sequence: Synthetic oligonucleotide
  misc_feature 1..20: note = Target: ANGPTL4; (-) strand; PAM type: NRG; PAM sequence: CAG
  source 1..20: mol_type = other DNA
ttggcgcctgcttgtgtccc

SEQ ID NO: 9111 - DNA, 20 bp, synthetic construct
  misc_feature 1..20: note = Description of Artificial Sequence: Synthetic oligonucleotide
  misc_feature 1..20: note = Target: ANGPTL4; (-) strand; PAM type: NRG; PAM sequence: TGG
  source 1..20: mol_type = other DNA
gagctccgcccagataccat

SEQ ID NO: 9112 - DNA, 20 bp, synthetic construct
  misc_feature 1..20: note = Description of Artificial Sequence: Synthetic oligonucleotide
  misc_feature 1..20: note = Target: ANGPTL4; (-) strand; PAM type: NRG; PAM sequence: CAG
  source 1..20: mol_type = other DNA
agaactctgtgagctccgcc

SEQ ID NO: 9113 - DNA, 20 bp, synthetic construct
  misc_feature 1..20: note = Description of Artificial Sequence: Synthetic oligonucleotide
  misc_feature 1..20: note = Target: ANGPTL4; (-) strand; PAM type: NRG; PAM sequence: GAG
  source 1..20: mol_type = other DNA
ttttattccaagaactctgt

SEQ ID NO: 9114 - DNA, 20 bp, synthetic construct
  misc_feature 1..20: note = Description of Artificial Sequence: Synthetic oligonucleotide
  misc_feature 1..20: note = Target: ANGPTL4; (-) strand; PAM type: NRG; PAM sequence: AAG
  source 1..20: mol_type = other DNA
tctgaggttgcttttattcc

SEQ ID NO: 9115 - DNA, 20 bp, synthetic construct
  misc_feature 1..20: note = Description of Artificial Sequence: Synthetic oligonucleotide
  misc_feature 1..20: note = Target: ANGPTL4; (-) strand; PAM type: NRG; PAM sequence: AGG
  source 1..20: mol_type = other DNA
acaaagaacaaagtgttctg

SEQ ID NO: 9116 - DNA, 20 bp, synthetic construct
  misc_feature 1..20: note = Description of Artificial Sequence: Synthetic oligonucleotide
  misc_feature 1..20: note = Target: ANGPTL4; (-) strand; PAM type: NRG; PAM sequence: GAG
  source 1..20: mol_type = other DNA
aacaaagaacaaagtgttct

SEQ ID NO: 9117 - DNA, 20 bp, synthetic construct
  misc_feature 1..20: note = Description of Artificial Sequence: Synthetic oligonucleotide
  misc_feature 1..20: note = Target: ANGPTL4; (-) strand; PAM type: NRG; PAM sequence: AAG
  source 1..20: mol_type = other DNA
acaaacaagaacaaagaaca

SEQ ID NO: 9118 - DNA, 20 bp, synthetic construct
  misc_feature 1..20: note = Description of Artificial Sequence: Synthetic oligonucleotide
  misc_feature 1..20: note = Target: ANGPTL4; (-) strand; PAM type: NRG; PAM sequence: AAG
  source 1..20: mol_type = other DNA
aaagaaaacaaacaagaaca

SEQ ID NO: 9119 - DNA, 20 bp, synthetic construct
  misc_feature 1..20: note = Description of Artificial Sequence: Synthetic oligonucleotide
  misc_feature 1..20: note = Target: ANGPTL4; (-) strand; PAM type: NRG; PAM sequence: AAG
  source 1..20: mol_type = other DNA
aaaaaagaaagaaaacaaac

SEQ ID NO: 9120 - DNA, 20 bp, synthetic construct
  misc_feature 1..20: note = Description of Artificial Sequence: Synthetic oligonucleotide
  misc_feature 1..20: note = Target: ANGPTL4; (-) strand; PAM type: NRG; PAM sequence: AAG
  source 1..20: mol_type = other DNA
aaagaaagagaaaaaaaaga

SEQ ID NO: 9121 - DNA, 20 bp, synthetic construct
  misc_feature 1..20: note = Description of Artificial Sequence: Synthetic oligonucleotide
  misc_feature 1..20: note = Target: ANGPTL4; (-) strand; PAM type: NRG; PAM sequence: AAG
  source 1..20: mol_type = other DNA
aactaaagaaagagaaaaaa

SEQ ID NO: 9122 - DNA, 20 bp, synthetic construct
  misc_feature 1..20: note = Description of Artificial Sequence: Synthetic oligonucleotide
  misc_feature 1..20: note = Target: ANGPTL4; (-) strand; PAM type: NRG; PAM sequence: GAG
  source 1..20: mol_type = other DNA
agatctgtgaactaaagaaa

SEQ ID NO: 9123 - DNA, 20 bp, synthetic construct
  misc_feature 1..20: note = Description of Artificial Sequence: Synthetic oligonucleotide
  misc_feature 1..20: note = Target: ANGPTL4; (-) strand; PAM type: NRG; PAM sequence: AAG
  source 1..20: mol_type = other DNA
ctagatctgtgaactaaaga

SEQ ID NO: 9124 - DNA, 20 bp, synthetic construct
  misc_feature 1..20: note = Description of Artificial Sequence: Synthetic oligonucleotide
  misc_feature 1..20: note = Target: ANGPTL4; (-) strand; PAM type: NRG; PAM sequence: AAG
  source 1..20: mol_type = other DNA
cttactagatctgtgaacta

SEQ ID NO: 9125 - DNA, 20 bp, synthetic construct
  misc_feature 1..20: note = Description of Artificial Sequence: Synthetic oligonucleotide
  misc_feature 1..20: note = Target: ANGPTL4; (-) strand; PAM type: NRG; PAM sequence: TAG
  source 1..20: mol_type = other DNA
acaaactgagggtaacttac

SEQ ID NO: 9126 - DNA, 20 bp, synthetic construct
  misc_feature 1..20: note = Description of Artificial Sequence: Synthetic oligonucleotide
  misc_feature 1..20: note = Target: ANGPTL4; (-) strand; PAM type: NRG; PAM sequence: GGG
  source 1..20: mol_type = other DNA
cactttttaaaacaaactga

SEQ ID NO: 9127 - DNA, 20 bp, synthetic construct
  misc_feature 1..20: note = Description of Artificial Sequence: Synthetic oligonucleotide
  misc_feature 1..20: note = Target: ANGPTL4; (-) strand; PAM type: NRG; PAM sequence: AGG
  source 1..20: mol_type = other DNA
tcactttttaaaacaaactg

SEQ ID NO: 9128 - DNA, 20 bp, synthetic construct
  misc_feature 1..20: note = Description of Artificial Sequence: Synthetic oligonucleotide
  misc_feature 1..20: note = Target: ANGPTL4; (-) strand; PAM type: NRG; PAM sequence: GAG
  source 1..20: mol_type = other DNA
ttcactttttaaaacaaact

SEQ ID NO: 9129 - DNA, 20 bp, synthetic construct
  misc_feature 1..20: note = Description of Artificial Sequence: Synthetic oligonucleotide
  misc_feature 1..20: note = Target: ANGPTL4; (-) strand; PAM type: NRG; PAM sequence: TGG
  source 1..20: mol_type = other DNA
gccctgggaacatgtttaca

SEQ ID NO: 9130 - DNA, 20 bp, synthetic construct
  misc_feature 1..20: note = Description of Artificial Sequence: Synthetic oligonucleotide
  misc_feature 1..20: note = Target: ANGPTL4; (-) strand; PAM type: NRG; PAM sequence: GGG
  source 1..20: mol_type = other DNA
gagacaccgtgcctggccct

SEQ ID NO: 9131 - DNA, 20 bp, synthetic construct
  misc_feature 1..20: note = Description of Artificial Sequence: Synthetic oligonucleotide
  misc_feature 1..20: note = Target: ANGPTL4; (-) strand; PAM type: NRG; PAM sequence: TGG
  source 1..20: mol_type = other DNA
cgagacaccgtgcctggccc

SEQ ID NO: 9132 - DNA, 20 bp, synthetic construct
  misc_feature 1..20: note = Description of Artificial Sequence: Synthetic oligonucleotide
  misc_feature 1..20: note = Target: ANGPTL4; (-) strand; PAM type: NRG; PAM sequence: TGG
  source 1..20: mol_type = other DNA
caggcacgagacaccgtgcc

SEQ ID NO: 9133 - DNA, 20 bp, synthetic construct
  misc_feature 1..20: note = Description of Artificial Sequence: Synthetic oligonucleotide
  misc_feature 1..20: note = Target: ANGPTL4; (-) strand; PAM type: NRG; PAM sequence: GAG
  source 1..20: mol_type = other DNA
atggctgggattacaggcac

SEQ ID NO: 9134 - DNA, 20 bp, synthetic construct
  misc_feature 1..20: note = Description of Artificial Sequence: Synthetic oligonucleotide
  misc_feature 1..20: note = Target: ANGPTL4; (-) strand; PAM type: NRG; PAM sequence: AGG
  source 1..20: mol_type = other DNA
tcacaaatggctgggattac

SEQ ID NO: 9135 - DNA, 20 bp, synthetic construct
  misc_feature 1..20: note = Description of Artificial Sequence: Synthetic oligonucleotide
  misc_feature 1..20: note = Target: ANGPTL4; (-) strand; PAM type: NRG; PAM sequence: CAG
  source 1..20: mol_type = other DNA
ctcacaaatggctgggatta

SEQ ID NO: 9136 - DNA, 20 bp, synthetic construct
  misc_feature 1..20: note = Description of Artificial Sequence: Synthetic oligonucleotide
  misc_feature 1..20: note = Target: ANGPTL4; (-) strand; PAM type: NRG; PAM sequence: GGG
  source 1..20: mol_type = other DNA
tctcggcctcacaaatggct

SEQ ID NO: 9137 - DNA, 20 bp, synthetic construct
  misc_feature 1..20: note = Description of Artificial Sequence: Synthetic oligonucleotide
  misc_feature 1..20: note = Target: ANGPTL4; (-) strand; PAM type: NRG; PAM sequence: TGG
  source 1..20: mol_type = other DNA
gtctcggcctcacaaatggc

SEQ ID NO: 9138 - DNA, 20 bp, synthetic construct
  misc_feature 1..20: note = Description of Artificial Sequence: Synthetic oligonucleotide
  misc_feature 1..20: note = Target: ANGPTL4; (-) strand; PAM type: NRG; PAM sequence: TGG
  source 1..20: mol_type = other DNA
gcctgtctcggcctcacaaa

SEQ ID NO: 9139 - DNA, 20 bp, synthetic construct
  misc_feature 1..20: note = Description of Artificial Sequence: Synthetic oligonucleotide
  misc_feature 1..20: note = Target: ANGPTL4; (-) strand; PAM type: NRG; PAM sequence: CGG
  source 1..20: mol_type = other DNA
ctcaagtgacctgcctgtct

SEQ ID NO: 9140 - DNA, 20 bp, synthetic construct
  misc_feature 1..20: note = Description of Artificial Sequence: Synthetic oligonucleotide
  misc_feature 1..20: note = Target: ANGPTL4; (-) strand; PAM type: NRG; PAM sequence: AAG
  source 1..20: mol_type = other DNA
ggtctcgaactgctgacctc

SEQ ID NO: 9141 - DNA, 20 bp, synthetic construct
  misc_feature 1..20: note = Description of Artificial Sequence: Synthetic oligonucleotide
  misc_feature 1..20: note = Target: ANGPTL4; (-) strand; PAM type: NRG; PAM sequence: TGG
  source 1..20: mol_type = other DNA
ttccaccatgttggcccggc

SEQ ID NO: 9142 - DNA, 20 bp, synthetic construct
  misc_feature 1..20: note = Description of Artificial Sequence: Synthetic oligonucleotide
  misc_feature 1..20: note = Target: ANGPTL4; (-) strand; PAM type: NRG; PAM sequence: CGG
  source 1..20: mol_type = other DNA
ggggttccaccatgttggcc

SEQ ID NO: 9143 - DNA, 20 bp, synthetic construct
  misc_feature 1..20: note = Description of Artificial Sequence: Synthetic oligonucleotide
  misc_feature 1..20: note = Target: ANGPTL4; (-) strand; PAM type: NRG; PAM sequence: TGG
  source 1..20: mol_type = other DNA
agatgggggttccaccatgt

SEQ ID NO: 9144 - DNA, 20 bp, synthetic construct
  misc_feature 1..20: note = Description of Artificial Sequence: Synthetic oligonucleotide
  misc_feature 1..20: note = Target: ANGPTL4; (-) strand; PAM type: NRG; PAM sequence: GGG
  source 1..20: mol_type = other DNA
gtatttttttgtagagatgg

SEQ ID NO: 9145 - DNA, 20 bp, synthetic construct
  misc_feature 1..20: note = Description of Artificial Sequence: Synthetic oligonucleotide
  misc_feature 1..20: note = Target: ANGPTL4; (-) strand; PAM type: NRG; PAM sequence: GGG
  source 1..20: mol_type = other DNA
tgtatttttttgtagagatg

SEQ ID NO: 9146 - DNA, 20 bp, synthetic construct
  misc_feature 1..20: note = Description of Artificial Sequence: Synthetic oligonucleotide
  misc_feature 1..20: note = Target: ANGPTL4; (-) strand; PAM type: NRG; PAM sequence: GGG
  source 1..20: mol_type = other DNA
ttgtatttttttgtagagat

SEQ ID NO: 9147 - DNA, 20 bp, synthetic construct
  misc_feature 1..20: note = Description of Artificial Sequence: Synthetic oligonucleotide
  misc_feature 1..20: note = Target: ANGPTL4; (-) strand; PAM type: NRG; PAM sequence: TGG
  source 1..20: mol_type = other DNA
tttgtatttttttgtagaga

SEQ ID NO: 9148 - DNA, 20 bp, synthetic construct
  misc_feature 1..20: note = Description of Artificial Sequence: Synthetic oligonucleotide
  misc_feature 1..20: note = Target: ANGPTL4; (-) strand; PAM type: NRG; PAM sequence: GAG
  source 1..20: mol_type = other DNA
aatttttgtatttttttgta

SEQ ID NO: 9149 - DNA, 20 bp, synthetic construct
  misc_feature 1..20: note = Description of Artificial Sequence: Synthetic oligonucleotide
  misc_feature 1..20: note = Target: ANGPTL4; (-) strand; PAM type: NRG; PAM sequence: TAG
  source 1..20: mol_type = other DNA
ctaatttttgtatttttttg

SEQ ID NO: 9150 - DNA, 20 bp, synthetic construct
  misc_feature 1..20: note = Description of Artificial Sequence: Synthetic oligonucleotide
  misc_feature 1..20: note = Target: ANGPTL4; (-) strand; PAM type: NRG; PAM sequence: CGG
  source 1..20: mol_type = other DNA
cagacgtgcaccaccatgct

SEQ ID NO: 9151 - DNA, 20 bp, synthetic construct
  misc_feature 1..20: note = Description of Artificial Sequence: Synthetic oligonucleotide
  misc_feature 1..20: note = Target: ANGPTL4; (-) strand; PAM type: NRG; PAM sequence: CAG
  source 1..20: mol_type = other DNA
ctctagagtagctgggacta

SEQ ID NO: 9152 - DNA, 20 bp, synthetic construct
  misc_feature 1..20: note = Description of Artificial Sequence: Synthetic oligonucleotide
  misc_feature 1..20: note = Target: ANGPTL4; (-) strand; PAM type: NRG; PAM sequence: GGG
  source 1..20: mol_type = other DNA
cgtcagcctctagagtagct

SEQ ID NO: 9153 - DNA, 20 bp, synthetic construct
  misc_feature 1..20: note = Description of Artificial Sequence: Synthetic oligonucleotide
  misc_feature 1..20: note = Target: ANGPTL4; (-) strand; PAM type: NRG; PAM sequence: TGG
  source 1..20: mol_type = other DNA
gcgtcagcctctagagtagc

SEQ ID NO: 9154 - DNA, 20 bp, synthetic construct
  misc_feature 1..20: note = Description of Artificial Sequence: Synthetic oligonucleotide
  misc_feature 1..20: note = Target: ANGPTL4; (-) strand; PAM type: NRG; PAM sequence: TAG
  source 1..20: mol_type = other DNA
ttctgcgtcagcctctagag

SEQ ID NO: 9155 - DNA, 20 bp, synthetic construct
  misc_feature 1..20: note = Description of Artificial Sequence: Synthetic oligonucleotide
  misc_feature 1..20: note = Target: ANGPTL4; (-) strand; PAM type: NRG; PAM sequence: GAG
  source 1..20: mol_type = other DNA
ttcttctgcgtcagcctcta

SEQ ID NO: 9156 - DNA, 20 bp, synthetic construct
  misc_feature 1..20: note = Description of Artificial Sequence: Synthetic oligonucleotide
  misc_feature 1..20: note = Target: ANGPTL4; (-) strand; PAM type: NRG; PAM sequence: TAG
  source 1..20: mol_type = other DNA
gattcttctgcgtcagcctc

SEQ ID NO: 9157 - DNA, 20 bp, synthetic construct
  misc_feature 1..20: note = Description of Artificial Sequence: Synthetic oligonucleotide
  misc_feature 1..20: note = Target: ANGPTL4; (-) strand; PAM type: NRG; PAM sequence: CAG
  source 1..20: mol_type = other DNA
ctcaagtgattcttctgcgt

SEQ ID NO: 9158 - DNA, 20 bp, synthetic construct
  misc_feature 1..20: note = Description of Artificial Sequence: Synthetic oligonucleotide
  misc_feature 1..20: note = Target: ANGPTL4; (-) strand; PAM type: NRG; PAM sequence: AAG
  source 1..20: mol_type = other DNA
agcctctgcctccttggctc

SEQ ID NO: 9159 - DNA, 20 bp, synthetic construct
  misc_feature 1..20: note = Description of Artificial Sequence: Synthetic oligonucleotide
  misc_feature 1..20: note = Target: ANGPTL4; (-) strand; PAM type: NRG; PAM sequence: TGG
  source 1..20: mol_type = other DNA
atttgcagcctctgcctcct

SEQ ID NO: 9160 - DNA, 20 bp, synthetic construct
  misc_feature 1..20: note = Description of Artificial Sequence: Synthetic oligonucleotide
  misc_feature 1..20: note = Target: ANGPTL4; (-) strand; PAM type: NRG; PAM sequence: CAG
  source 1..20: mol_type = other DNA
gcgcaatctcggcttatttg

SEQ ID NO: 9161 - DNA, 20 bp, synthetic construct
  misc_feature 1..20: note = Description of Artificial Sequence: Synthetic oligonucleotide
  misc_feature 1..20: note = Target: ANGPTL4; (-) strand; PAM type: NRG; PAM sequence: CGG
  source 1..20: mol_type = other DNA
ggagtgcagtggcgcaatct

SEQ ID NO: 9162 - DNA, 20 bp, synthetic construct
  misc_feature 1..20: note = Description of Artificial Sequence: Synthetic oligonucleotide
  misc_feature 1..20: note = Target: ANGPTL4; (-) strand; PAM type: NRG; PAM sequence: TGG
  source 1..20: mol_type = other DNA
ttgcccaggctggagtgcag

SEQ ID NO: 9163 - DNA, 20 bp, synthetic construct
  misc_feature 1..20: note = Description of Artificial Sequence: Synthetic oligonucleotide
  misc_feature 1..20: note = Target: ANGPTL4; (-) strand; PAM type: NRG; PAM sequence: CAG
  source 1..20: mol_type = other DNA
ctgttgcccaggctggagtg

SEQ ID NO: 9164 - DNA, 20 bp, synthetic construct
  misc_feature 1..20: note = Description of Artificial Sequence: Synthetic oligonucleotide
  misc_feature 1..20: note = Target: ANGPTL4; (-) strand; PAM type: NRG; PAM sequence: GAG
  source 1..20: mol_type = other DNA
ttgctctgttgcccaggctg

SEQ ID NO: 9165 - DNA, 20 bp, synthetic construct
  misc_feature 1..20: note = Description of Artificial Sequence: Synthetic oligonucleotide
  misc_feature 1..20: note = Target: ANGPTL4; (-) strand; PAM type: NRG; PAM sequence: TGG
  source 1..20: mol_type = other DNA
tcttgctctgttgcccaggc

SEQ ID NO: 9166 - DNA, 20 bp, synthetic construct
  misc_feature 1..20: note = Description of Artificial Sequence: Synthetic oligonucleotide
  misc_feature 1..20: note = Target: ANGPTL4; (-) strand; PAM type: NRG; PAM sequence: AGG
  source 1..20: mol_type = other DNA
ggagtcttgctctgttgccc

SEQ ID NO: 9167 - DNA, 20 bp, synthetic construct
  misc_feature 1..20: note = Description of Artificial Sequence: Synthetic oligonucleotide
  misc_feature 1..20: note = Target: ANGPTL4; (-) strand; PAM type: NRG; PAM sequence: CAG
  source 1..20: mol_type = other DNA
tggagtcttgctctgttgcc

SEQ ID NO: 9168 - DNA, 20 bp, synthetic construct
  misc_feature 1..20: note = Description of Artificial Sequence: Synthetic oligonucleotide
  misc_feature 1..20: note = Target: ANGPTL4; (-) strand; PAM type: NRG; PAM sequence: GAG
  source 1..20: mol_type = other DNA
attatttttgttttgagatg

SEQ ID NO: 9169 - DNA, 20 bp, synthetic construct
  misc_feature 1..20: note = Description of Artificial Sequence: Synthetic oligonucleotide
  misc_feature 1..20: note = Target: ANGPTL4; (-) strand; PAM type: NRG; PAM sequence: TGG
  source 1..20: mol_type = other DNA
aaattatttttgttttgaga

SEQ ID NO: 9170 - DNA, 20 bp, synthetic construct
  misc_feature 1..20: note = Description of Artificial Sequence: Synthetic oligonucleotide
  misc_feature 1..20: note = Target: ANGPTL4; (-) strand; PAM type: NRG; PAM sequence: GAG
  source 1..20: mol_type = other DNA
aaaaaaattatttttgtttt

SEQ ID NO: 9171 - DNA, 20 bp, synthetic construct
  misc_feature 1..20: note = Description of Artificial Sequence: Synthetic oligonucleotide
  misc_feature 1..20: note = Target: ANGPTL4; (-) strand; PAM type: NRG; PAM sequence: GAG
  source 1..20: mol_type = other DNA
accagcctggacaatagaat

SEQ ID NO: 9172 - DNA, 20 bp, synthetic construct
  misc_feature 1..20: note = Description of Artificial Sequence: Synthetic oligonucleotide
  misc_feature 1..20: note = Target: ANGPTL4; (-) strand; PAM type: NRG; PAM sequence: TAG
  source 1..20: mol_type = other DNA
tttgagaccagcctggacaa

SEQ ID NO: 9173 - DNA, 20 bp, synthetic construct
  misc_feature 1..20: note = Description of Artificial Sequence: Synthetic oligonucleotide
  misc_feature 1..20: note = Target: ANGPTL4; (-) strand; PAM type: NRG; PAM sequence: TGG
  source 1..20: mol_type = other DNA
ctcggtgtttgagaccagcc

SEQ ID NO: 9174 - DNA, 20 bp, synthetic construct
  misc_feature 1..20: note = Description of Artificial Sequence: Synthetic oligonucleotide
  misc_feature 1..20: note = Target: ANGPTL4; (-) strand; PAM type: NRG; PAM sequence: CAG
  source 1..20: mol_type = other DNA
tgagtctcggtgtttgagac

SEQ ID NO: 9175 - DNA, 20 bp, synthetic construct
  misc_feature 1..20: note = Description of Artificial Sequence: Synthetic oligonucleotide
  misc_feature 1..20: note = Target: ANGPTL4; (-) strand; PAM type: NRG; PAM sequence: GAG
  source 1..20: mol_type = other DNA
tcccttgagtctcggtgttt

SEQ ID NO: 9176 - DNA, 20 bp, synthetic construct
  misc_feature 1..20: note = Description of Artificial Sequence: Synthetic oligonucleotide
  misc_feature 1..20: note = Target: ANGPTL4; (-) strand; PAM type: NRG; PAM sequence: CGG
  source 1..20: mol_type = other DNA
caggaggatcccttgagtct

SEQ ID NO: 9177 - DNA, 20 bp, synthetic construct
  misc_feature 1..20: note = Description of Artificial Sequence: Synthetic oligonucleotide
  misc_feature 1..20: note = Target: ANGPTL4; (-) strand; PAM type: NRG; PAM sequence: GAG
  source 1..20: mol_type = other DNA
ccaaggcaggaggatccctt

SEQ ID NO: 9178 - DNA, 20 bp, synthetic construct
  misc_feature 1..20: note = Description of Artificial Sequence: Synthetic oligonucleotide
  misc_feature 1..20: note = Target: ANGPTL4; (-) strand; PAM type: NRG; PAM sequence: AGG
  source 1..20: mol_type = other DNA
ctttgtgaagccaaggcagg

SEQ ID NO: 9179 - DNA, 20 bp, synthetic construct
  misc_feature 1..20: note = Description of Artificial Sequence: Synthetic oligonucleotide
  misc_feature 1..20: note = Target: ANGPTL4; (-) strand; PAM type: NRG; PAM sequence: GAG
  source 1..20: mol_type = other DNA
actttgtgaagccaaggcag

SEQ ID NO: 9180 - DNA, 20 bp, synthetic construct
  misc_feature 1..20: note = Description of Artificial Sequence: Synthetic oligonucleotide
  misc_feature 1..20: note = Target: ANGPTL4; (-) strand; PAM type: NRG; PAM sequence: AGG
  source 1..20: mol_type = other DNA
tcactttgtgaagccaaggc

SEQ ID NO: 9181 - DNA, 20 bp, synthetic construct
  misc_feature 1..20: note = Description of Artificial Sequence: Synthetic oligonucleotide
  misc_feature 1..20: note = Target: ANGPTL4; (-) strand; PAM type: NRG; PAM sequence: CAG
  source 1..20: mol_type = other DNA
atcactttgtgaagccaagg

SEQ ID NO: 9182 - DNA, 20 bp, synthetic construct
  misc_feature 1..20: note = Description of Artificial Sequence: Synthetic oligonucleotide
  misc_feature 1..20: note = Target: ANGPTL4; (-) strand; PAM type: NRG; PAM sequence: AGG
  source 1..20: mol_type = other DNA
cccatcactttgtgaagcca

SEQ ID NO: 9183 - DNA, 20 bp, synthetic construct
  misc_feature 1..20: note = Description of Artificial Sequence: Synthetic oligonucleotide
  misc_feature 1..20: note = Target: ANGPTL4; (-) strand; PAM type: NRG; PAM sequence: AAG
  source 1..20: mol_type = other DNA
tcccatcactttgtgaagcc

SEQ ID NO: 9184 - DNA, 20 bp, synthetic construct
  misc_feature 1..20: note = Description of Artificial Sequence: Synthetic oligonucleotide
  misc_feature 1..20: note = Target: ANGPTL4; (-) strand; PAM type: NRG; PAM sequence: AAG
  source 1..20: mol_type = other DNA
tttaatcccatcactttgtg

SEQ ID NO: 9185 - DNA, 20 bp, synthetic construct
  misc_feature 1..20: note = Description of Artificial Sequence: Synthetic oligonucleotide
  misc_feature 1..20: note = Target: ANGPTL4; (-) strand; PAM type: NRG; PAM sequence: TGG
  source 1..20: mol_type = other DNA
gccttcaggggtgggtgcag

SEQ ID NO: 9186 - DNA, 20 bp, synthetic construct
  misc_feature 1..20: note = Description of Artificial Sequence: Synthetic oligonucleotide
  misc_feature 1..20: note = Target: ANGPTL4; (-) strand; PAM type: NRG; PAM sequence: CAG
  source 1..20: mol_type = other DNA
agagccttcaggggtgggtg

SEQ ID NO: 9187 - DNA, 20 bp, synthetic construct
  misc_feature 1..20: note = Description of Artificial Sequence: Synthetic oligonucleotide
  misc_feature 1..20: note = Target: ANGPTL4; (-) strand; PAM type: NRG; PAM sequence: GGG
  source 1..20: mol_type = other DNA
gaattagagccttcaggggt

SEQ ID NO: 9188 - DNA, 20 bp, synthetic construct
  misc_feature 1..20: note = Description of Artificial Sequence: Synthetic oligonucleotide
  misc_feature 1..20: note = Target: ANGPTL4; (-) strand; PAM type: NRG; PAM sequence: TGG
  source 1..20: mol_type = other DNA
agaattagagccttcagggg

SEQ ID NO: 9189 - DNA, 20 bp, synthetic construct
  misc_feature 1..20: note = Description of Artificial Sequence: Synthetic oligonucleotide
  misc_feature 1..20: note = Target: ANGPTL4; (-) strand; PAM type: NRG; PAM sequence: GGG
  source 1..20: mol_type = other DNA
tgtagaattagagccttcag

SEQ ID NO: 9190 - DNA, 20 bp, synthetic construct
  misc_feature 1..20: note = Description of Artificial Sequence: Synthetic oligonucleotide
  misc_feature 1..20: note = Target: ANGPTL4; (-) strand; PAM type: NRG; PAM sequence: GGG
  source 1..20: mol_type = other DNA
atgtagaattagagccttca

SEQ ID NO: 9191 - DNA, 20 bp, synthetic construct
  misc_feature 1..20: note = Description of Artificial Sequence: Synthetic oligonucleotide
  misc_feature 1..20: note = Target: ANGPTL4; (-) strand; PAM type: NRG; PAM sequence: AGG
  source 1..20: mol_type = other DNA
gatgtagaattagagccttc

SEQ ID NO: 9192 - DNA, 20 bp, synthetic construct
  misc_feature 1..20: note = Description of Artificial Sequence: Synthetic oligonucleotide
  misc_feature 1..20: note = Target: ANGPTL4; (-) strand; PAM type: NRG; PAM sequence: CAG
  source 1..20: mol_type = other DNA
agatgtagaattagagcctt

SEQ ID NO: 9193 - DNA, 20 bp, synthetic construct
  misc_feature 1..20: note = Description of Artificial Sequence: Synthetic oligonucleotide
  misc_feature 1..20: note = Target: ANGPTL4; (-) strand; PAM type: NRG; PAM sequence: GAG
  source 1..20: mol_type = other DNA
aaaacacagatgtagaatta

SEQ ID NO: 9194 - DNA, 20 bp, synthetic construct
  misc_feature 1..20: note = Description of Artificial Sequence: Synthetic oligonucleotide
  misc_feature 1..20: note = Target: ANGPTL4; (-) strand; PAM type: NRG; PAM sequence: TAG
  source 1..20: mol_type = other DNA
acaaaacacagatgtagaat

SEQ ID NO: 9195 - DNA, 20 bp, synthetic construct
  misc_feature 1..20: note = Description of Artificial Sequence: Synthetic oligonucleotide
  misc_feature 1..20: note = Target: ANGPTL4; (-) strand; PAM type: NRG; PAM sequence: TAG
  source 1..20: mol_type = other DNA
tttttaacaaaacacagatg

SEQ ID NO: 9196 - DNA, 20 bp, synthetic construct
  misc_feature 1..20: note = Description of Artificial Sequence: Synthetic oligonucleotide
  misc_feature 1..20: note = Target: ANGPTL4; (-) strand; PAM type: NRG; PAM sequence: CAG
  source 1..20: mol_type = other DNA
tttttttttttaacaaaaca

SEQ ID NO: 9197 - DNA, 20 bp, synthetic construct
  misc_feature 1..20: note = Description of Artificial Sequence: Synthetic oligonucleotide
  misc_feature 1..20: note = Target: ANGPTL4; (-) strand; PAM type: NRG; PAM sequence: GAG
  source 1..20: mol_type = other DNA
agtgctgggattacaggcat

SEQ ID NO: 9198 - DNA, 20 bp, synthetic construct
  misc_feature 1..20: note = Description of Artificial Sequence: Synthetic oligonucleotide
  misc_feature 1..20: note = Target: ANGPTL4; (-) strand; PAM type: NRG; PAM sequence: AGG
  source 1..20: mol_type = other DNA
tcctaaagtgctgggattac

SEQ ID NO: 9199 - DNA, 20 bp, synthetic construct
  misc_feature 1..20: note = Description of Artificial Sequence: Synthetic oligonucleotide
  misc_feature 1..20: note = Target: ANGPTL4; (-) strand; PAM type: NRG; PAM sequence: CAG
  source 1..20: mol_type = other DNA
ctcctaaagtgctgggatta

SEQ ID NO: 9200 - DNA, 20 bp, synthetic construct
  misc_feature 1..20: note = Description of Artificial Sequence: Synthetic oligonucleotide
  misc_feature 1..20: note = Target: ANGPTL4; (-) strand; PAM type: NRG; PAM sequence: GGG
  source 1..20: mol_type = other DNA
cctcggcctcctaaagtgct

SEQ ID NO: 9201 - DNA, 20 bp, synthetic construct
  misc_feature 1..20: note = Description of Artificial Sequence: Synthetic oligonucleotide
  misc_feature 1..20: note = Target: ANGPTL4; (-) strand; PAM type: NRG; PAM sequence: TGG
  source 1..20: mol_type = other DNA
gcctcggcctcctaaagtgc

SEQ ID NO: 9202 - DNA, 20 bp, synthetic construct
  misc_feature 1..20: note = Description of Artificial Sequence: Synthetic oligonucleotide
  misc_feature 1..20: note = Target: ANGPTL4; (-) strand; PAM type: NRG; PAM sequence: AAG
  source 1..20: mol_type = other DNA
ccacctgcctcggcctccta

SEQ ID NO: 9203 - DNA, 20 bp, synthetic construct
  misc_feature 1..20: note = Description of Artificial Sequence: Synthetic oligonucleotide
  misc_feature 1..20: note = Target: ANGPTL4; (-) strand; PAM type: NRG; PAM sequence: CGG
  source 1..20: mol_type = other DNA
gtcagatgatccacctgcct

SEQ ID NO: 9204 - DNA, 20 bp, synthetic construct
  misc_feature 1..20: note = Description of Artificial Sequence: Synthetic oligonucleotide
  misc_feature 1..20: note = Target: ANGPTL4; (-) strand; PAM type: NRG; PAM sequence: CAG
  source 1..20: mol_type = other DNA
gggcctggaactcgtaatgt

SEQ ID NO: 9205 - DNA, 20 bp, synthetic construct
  misc_feature 1..20: note = Description of Artificial Sequence: Synthetic oligonucleotide
  misc_feature 1..20: note = Target: ANGPTL4; (-) strand; PAM type: NRG; PAM sequence: TGG
  source 1..20: mol_type = other DNA
ccatgttggtcaggcgggcc

SEQ ID NO: 9206 - DNA, 20 bp, synthetic construct
  misc_feature 1..20: note = Description of Artificial Sequence: Synthetic oligonucleotide
  misc_feature 1..20: note = Target: ANGPTL4; (-) strand; PAM type: NRG; PAM sequence: GGG
  source 1..20: mol_type = other DNA
tttcaccatgttggtcaggc

SEQ ID NO: 9207 - DNA, 20 bp, synthetic construct
  misc_feature 1..20: note = Description of Artificial Sequence: Synthetic oligonucleotide
  misc_feature 1..20: note = Target: ANGPTL4; (-) strand; PAM type: NRG; PAM sequence: CGG
  source 1..20: mol_type = other DNA
gtttcaccatgttggtcagg

SEQ ID NO: 9208 - DNA, 20 bp, synthetic construct
  misc_feature 1..20: note = Description of Artificial Sequence: Synthetic oligonucleotide
  misc_feature 1..20: note = Target: ANGPTL4; (-) strand; PAM type: NRG; PAM sequence: AGG
  source 1..20: mol_type = other DNA
ggggtttcaccatgttggtc

SEQ ID NO: 9209 - DNA, 20 bp, synthetic construct
  misc_feature 1..20: note = Description of Artificial Sequence: Synthetic oligonucleotide
  misc_feature 1..20: note = Target: ANGPTL4; (-) strand; PAM type: NRG; PAM sequence: CAG
  source 1..20: mol_type = other DNA
cggggtttcaccatgttggt

SEQ ID NO: 9210 - DNA, 20 bp, synthetic construct
  misc_feature 1..20: note = Description of Artificial Sequence: Synthetic oligonucleotide
  misc_feature 1..20: note = Target: ANGPTL4; (-) strand; PAM type: NRG; PAM sequence: TGG
  source 1..20: mol_type = other DNA
gagacggggtttcaccatgt

SEQ ID NO: 9211 - DNA, 20 bp, synthetic construct
  misc_feature 1..20: note = Description of Artificial Sequence: Synthetic oligonucleotide
  misc_feature 1..20: note = Target: ANGPTL4; (-) strand; PAM type: NRG; PAM sequence: GGG
  source 1..20: mol_type = other DNA
ttgtatttttagtagagacg

SEQ ID NO: 9212 - DNA, 20 bp, synthetic construct
  misc_feature 1..20: note = Description of Artificial Sequence: Synthetic oligonucleotide
  misc_feature 1..20: note = Target: ANGPTL4; (-) strand; PAM type: NRG; PAM sequence: GGG
  source 1..20: mol_type = other DNA
tttgtatttttagtagagac

SEQ ID NO: 9213 - DNA, 20 bp, synthetic construct
  misc_feature 1..20: note = Description of Artificial Sequence: Synthetic oligonucleotide
  misc_feature 1..20: note = Target: ANGPTL4; (-) strand; PAM type: NRG; PAM sequence: CGG
  source 1..20: mol_type = other DNA
ttttgtatttttagtagaga

SEQ ID NO: 9214 - DNA, 20 bp, synthetic construct
  misc_feature 1..20: note = Description of Artificial Sequence: Synthetic oligonucleotide
  misc_feature 1..20: note = Target: ANGPTL4; (-) strand; PAM type: NRG; PAM sequence: GAG
  source 1..20: mol_type = other DNA
taatttttgtatttttagta

SEQ ID NO: 9215 - DNA, 20 bp, synthetic construct
  misc_feature 1..20: note = Description of Artificial Sequence: Synthetic oligonucleotide
  misc_feature 1..20: note = Target: ANGPTL4; (-) strand; PAM type: NRG; PAM sequence: TAG
  source 1..20: mol_type = other DNA
gctaatttttgtatttttag

SEQ ID NO: 9216 - DNA, 20 bp, synthetic construct
  misc_feature 1..20: note = Description of Artificial Sequence: Synthetic oligonucleotide
  misc_feature 1..20: note = Target: ANGPTL4; (-) strand; PAM type: NRG; PAM sequence: TAG
  source 1..20: mol_type = other DNA
ccggctaatttttgtatttt

SEQ ID NO: 9217 - DNA, 20 bp, synthetic construct
  misc_feature 1..20: note = Description of Artificial Sequence: Synthetic oligonucleotide
  misc_feature 1..20: note = Target: ANGPTL4; (-) strand; PAM type: NRG; PAM sequence: CGG
  source 1..20: mol_type = other DNA
caggcacccgccaccacacc

SEQ ID NO: 9218 - DNA, 20 bp, synthetic construct
  misc_feature 1..20: note = Description of Artificial Sequence: Synthetic oligonucleotide
  misc_feature 1..20: note = Target: ANGPTL4; (-) strand; PAM type: NRG; PAM sequence: AGG
  source 1..20: mol_type = other DNA
tcctgagtagctgggattac

SEQ ID NO: 9219 - DNA, 20 bp, synthetic construct
  misc_feature 1..20: note = Description of Artificial Sequence: Synthetic oligonucleotide
  misc_feature 1..20: note = Target: ANGPTL4; (-) strand; PAM type: NRG; PAM sequence: CAG
  source 1..20: mol_type = other DNA
ctcctgagtagctgggatta

SEQ ID NO: 9220 - DNA, 20 bp, synthetic construct
  misc_feature 1..20: note = Description of Artificial Sequence: Synthetic oligonucleotide
  misc_feature 1..20: note = Target: ANGPTL4; (-) strand; PAM type: NRG; PAM sequence: GGG
  source 1..20: mol_type = other DNA
cctcagcctcctgagtagct

SEQ ID NO: 9221 - DNA, 20 bp, synthetic construct
  misc_feature 1..20: note = Description of Artificial Sequence: Synthetic oligonucleotide
  misc_feature 1..20: note = Target: ANGPTL4; (-) strand; PAM type: NRG; PAM sequence: TGG
  source 1..20: mol_type = other DNA
gcctcagcctcctgagtagc

SEQ ID NO: 9222 - DNA, 20 bp, synthetic construct
  misc_feature 1..20: note = Description of Artificial Sequence: Synthetic oligonucleotide
  misc_feature 1..20: note = Target: ANGPTL4; (-) strand; PAM type: NRG; PAM sequence: TAG
  source 1..20: mol_type = other DNA
tcctgcctcagcctcctgag

SEQ ID NO: 9223 - DNA, 20 bp, synthetic construct
  misc_feature 1..20: note = Description of Artificial Sequence: Synthetic oligonucleotide
  misc_feature 1..20: note = Target: ANGPTL4; (-) strand; PAM type: NRG; PAM sequence: GAG
  source 1..20: mol_type = other DNA
ttctcctgcctcagcctcct

SEQ ID NO: 9224 - DNA, 20 bp, synthetic construct
  misc_feature 1..20: note = Description of Artificial Sequence: Synthetic oligonucleotide
  misc_feature 1..20: note = Target: ANGPTL4; (-) strand; PAM type: NRG; PAM sequence: CAG
  source 1..20: mol_type = other DNA
ttcaagtgattctcctgcct

SEQ ID NO: 9225 - DNA, 20 bp, synthetic construct
  misc_feature 1..20: note = Description of Artificial Sequence: Synthetic oligonucleotide
  misc_feature 1..20: note = Target: ANGPTL4; (-) strand; PAM type: NRG; PAM sequence: AAG
  source 1..20: mol_type = other DNA
aacctccacctcccgagttc

SEQ ID NO: 9226 - DNA, 20 bp, synthetic construct
  misc_feature 1..20: note = Description of Artificial Sequence: Synthetic oligonucleotide
  misc_feature 1..20: note = Target: ANGPTL4; (-) strand; PAM type: NRG; PAM sequence: GAG
  source 1..20: mol_type = other DNA
caccgcaacctccacctccc

SEQ ID NO: 9227 - DNA, 20 bp, synthetic construct
  misc_feature 1..20: note = Description of Artificial Sequence: Synthetic oligonucleotide
  misc_feature 1..20: note = Target: ANGPTL4; (-) strand; PAM type: NRG; PAM sequence: TGG
  source 1..20: mol_type = other DNA
tcacccaggctggagtgcag

SEQ ID NO: 9228 - DNA, 20 bp, synthetic construct
  misc_feature 1..20: note = Description of Artificial Sequence: Synthetic oligonucleotide
  misc_feature 1..20: note = Target: ANGPTL4; (-) strand; PAM type: NRG; PAM sequence: CAG
  source 1..20: mol_type = other DNA
ctgtcacccaggctggagtg

SEQ ID NO: 9229 - DNA, 20 bp, synthetic construct
  misc_feature 1..20: note = Description of Artificial Sequence: Synthetic oligonucleotide
  misc_feature 1..20: note = Target: ANGPTL4; (-) strand; PAM type: NRG; PAM sequence: GAG
  source 1..20: mol_type = other DNA
ttgctctgtcacccaggctg

SEQ ID NO: 9230 - DNA, 20 bp, synthetic construct
  misc_feature 1..20: note = Description of Artificial Sequence: Synthetic oligonucleotide
  misc_feature 1..20: note = Target: ANGPTL4; (-) strand; PAM type: NRG; PAM sequence: TGG
  source 1..20: mol_type = other DNA
tcttgctctgtcacccaggc

SEQ ID NO: 9231 - DNA, 20 bp, synthetic construct
  misc_feature 1..20: note = Description of Artificial Sequence: Synthetic oligonucleotide
  misc_feature 1..20: note = Target: ANGPTL4; (-) strand; PAM type: NRG; PAM sequence: AGG
  source 1..20: mol_type = other DNA
caagtcttgctctgtcaccc

SEQ ID NO: 9232 - DNA, 20 bp, synthetic construct
  misc_feature 1..20: note = Description of Artificial Sequence: Synthetic oligonucleotide
  misc_feature 1..20: note = Target: ANGPTL4; (-) strand; PAM type: NRG; PAM sequence: CAG
  source 1..20: mol_type = other DNA
tcaagtcttgctctgtcacc

SEQ ID NO: 9233 - DNA, 20 bp, synthetic construct
  misc_feature 1..20: note = Description of Artificial Sequence: Synthetic oligonucleotide
  misc_feature 1..20: note = Target: ANGPTL4; (-) strand; PAM type: NRG; PAM sequence: AAG
  source 1..20: mol_type = other DNA
ttttttttttttttgaaatc

SEQ ID NO: 9234 - DNA, 20 bp, synthetic construct
  misc_feature 1..20: note = Description of Artificial Sequence: Synthetic oligonucleotide
  misc_feature 1..20: note = Target: ANGPTL4; (-) strand; PAM type: NRG; PAM sequence: CAG
  source 1..20: mol_type = other DNA
caagtgtgagccaatgcgcc

SEQ ID NO: 9235 - DNA, 20 bp, synthetic construct
  misc_feature 1..20: note = Description of Artificial Sequence: Synthetic oligonucleotide
  misc_feature 1..20: note = Target: ANGPTL4; (-) strand; PAM type: NRG; PAM sequence: GAG
  source 1..20: mol_type = other DNA
agtgctagtgttacaagtgt

SEQ ID NO: 9236 - DNA, 20 bp, synthetic construct
  misc_feature 1..20: note = Description of Artificial Sequence: Synthetic oligonucleotide
  misc_feature 1..20: note = Target: ANGPTL4; (-) strand; PAM type: NRG; PAM sequence: AAG
  source 1..20: mol_type = other DNA
tcccaaagtgctagtgttac

SEQ ID NO: 9237 - DNA, 20 bp, synthetic construct
  misc_feature 1..20: note = Description of Artificial Sequence: Synthetic oligonucleotide
  misc_feature 1..20: note = Target: ANGPTL4; (-) strand; PAM type: NRG; PAM sequence: TAG
  source 1..20: mol_type = other DNA
tcgttggcctcccaaagtgc

SEQ ID NO: 9238 - DNA, 20 bp, synthetic construct
  misc_feature 1..20: note = Description of Artificial Sequence: Synthetic oligonucleotide
  misc_feature 1..20: note = Target: ANGPTL4; (-) strand; PAM type: NRG; PAM sequence: AAG
  source 1..20: mol_type = other DNA
atccgctcgttggcctccca

SEQ ID NO: 9239 - DNA, 20 bp, synthetic construct
  misc_feature 1..20: note = Description of Artificial Sequence: Synthetic oligonucleotide
  misc_feature 1..20: note = Target: ANGPTL4; (-) strand; PAM type: NRG; PAM sequence: TGG
  source 1..20: mol_type = other DNA
acctcgggtgatccgctcgt

SEQ ID NO: 9240 - DNA, 20 bp, synthetic construct
  misc_feature 1..20: note = Description of Artificial Sequence: Synthetic oligonucleotide
  misc_feature 1..20: note = Target: ANGPTL4; (-) strand; PAM type: NRG; PAM sequence: GGG
  source 1..20: mol_type = other DNA
cagcgggatcacccgacctc

SEQ ID NO: 9241 - DNA, 20 bp, synthetic construct
  misc_feature 1..20: note = Description of Artificial Sequence: Synthetic oligonucleotide
  misc_feature 1..20: note = Target: ANGPTL4; (-) strand; PAM type: NRG; PAM sequence: CGG
  source 1..20: mol_type = other DNA
acagcgggatcacccgacct

SEQ ID NO: 9242 - DNA, 20 bp, synthetic construct
  misc_feature 1..20: note = Description of Artificial Sequence: Synthetic oligonucleotide
  misc_feature 1..20: note = Target: ANGPTL4; (-) strand; PAM type: NRG; PAM sequence: GGG
  source 1..20: mol_type = other DNA
actatatagagcaatacagc

SEQ ID NO: 9243 - DNA, 20 bp, synthetic construct
  misc_feature 1..20: note = Description of Artificial Sequence: Synthetic oligonucleotide
  misc_feature 1..20: note = Target: ANGPTL4; (-) strand; PAM type: NRG; PAM sequence: CGG
  source 1..20: mol_type = other DNA
cactatatagagcaatacag

SEQ ID NO: 9244 - DNA, 20 bp, synthetic construct
  misc_feature 1..20: note = Description of Artificial Sequence: Synthetic oligonucleotide
  misc_feature 1..20: note = Target: ANGPTL4; (-) strand; PAM type: NRG; PAM sequence: CAG
  source 1..20: mol_type = other DNA
tctcactatatagagcaata

SEQ ID NO: 9245 - DNA, 20 bp, synthetic construct
  misc_feature 1..20: note = Description of Artificial Sequence: Synthetic oligonucleotide
  misc_feature 1..20: note = Target: ANGPTL4; (-) strand; PAM type: NRG; PAM sequence: GAG
  source 1..20: mol_type = other DNA
tatagggatctcactatata

SEQ ID NO: 9246 - DNA, 20 bp, synthetic construct
  misc_feature 1..20: note = Description of Artificial Sequence: Synthetic oligonucleotide
  misc_feature 1..20: note = Target: ANGPTL4; (-) strand; PAM type: NRG; PAM sequence: TAG
  source 1..20: mol_type = other DNA
tatatagggatctcactata

SEQ ID NO: 9247 - DNA, 20 bp, synthetic construct
  misc_feature 1..20: note = Description of Artificial Sequence: Synthetic oligonucleotide
  misc_feature 1..20: note = Target: ANGPTL4; (-) strand; PAM type: NRG; PAM sequence: GGG
  source 1..20: mol_type = other DNA
atagagtgagaccctatata

SEQ ID NO: 9248 - DNA, 20 bp, synthetic construct
  misc_feature 1..20: note = Description of Artificial Sequence: Synthetic oligonucleotide
  misc_feature 1..20: note = Target: ANGPTL4; (-) strand; PAM type: NRG; PAM sequence: AGG
  source 1..20: mol_type = other DNA
aatagagtgagaccctatat

SEQ ID NO: 9249 - DNA, 20 bp, synthetic construct
  misc_feature 1..20: note = Description of Artificial Sequence: Synthetic oligonucleotide
  misc_feature 1..20: note = Target: ANGPTL4; (-) strand; PAM type: NRG; PAM sequence: TAG
  source 1..20: mol_type = other DNA
caatagagtgagaccctata

SEQ ID NO: 9250 - DNA, 20 bp, synthetic construct
  misc_feature 1..20: note = Description of Artificial Sequence: Synthetic oligonucleotide
  misc_feature 1..20: note = Target: ANGPTL4; (-) strand; PAM type: NRG; PAM sequence: GAG
  source 1..20: mol_type = other DNA
accagcctggacaatagagt

SEQ ID NO: 9251 - DNA, 20 bp, synthetic construct
  misc_feature 1..20: note = Description of Artificial Sequence: Synthetic oligonucleotide
  misc_feature 1..20: note = Target: ANGPTL4; (-) strand; PAM type: NRG; PAM sequence: GAG
  source 1..20: mol_type = other DNA
ccagaccagcctggacaata

SEQ ID NO: 9252 - DNA, 20 bp, synthetic construct
  misc_feature 1..20: note = Description of Artificial Sequence: Synthetic oligonucleotide
  misc_feature 1..20: note = Target: ANGPTL4; (-) strand; PAM type: NRG; PAM sequence: TAG
  source 1..20: mol_type = other DNA
ggccagaccagcctggacaa

SEQ ID NO: 9253 - DNA, 20 bp, synthetic construct
  misc_feature 1..20: note = Description of Artificial Sequence: Synthetic oligonucleotide
  misc_feature 1..20: note = Target: ANGPTL4; (-) strand; PAM type: NRG; PAM sequence: TGG
  source 1..20: mol_type = other DNA
ttggccaggccagaccagcc

SEQ ID NO: 9254 - DNA, 20 bp, synthetic construct
  misc_feature 1..20: note = Description of Artificial Sequence: Synthetic oligonucleotide
  misc_feature 1..20: note = Target: ANGPTL4; (-) strand; PAM type: NRG; PAM sequence: CAG
  source 1..20: mol_type = other DNA
ccacattggccaggccagac

SEQ ID NO: 9255 - DNA, 20 bp, synthetic construct
  misc_feature 1..20: note = Description of Artificial Sequence: Synthetic oligonucleotide
  misc_feature 1..20: note = Target: ANGPTL4; (-) strand; PAM type: NRG; PAM sequence: CAG
  source 1..20: mol_type = other DNA
tttcaccacattggccaggc

SEQ ID NO: 9256 - DNA, 20 bp, synthetic construct
  misc_feature 1..20: note = Description of Artificial Sequence: Synthetic oligonucleotide
  misc_feature 1..20: note = Target: ANGPTL4; (-) strand; PAM type: NRG; PAM sequence: AGG
  source 1..20: mol_type = other DNA
gaggtttcaccacattggcc

SEQ ID NO: 9257 - DNA, 20 bp, synthetic construct
  misc_feature 1..20: note = Description of Artificial Sequence: Synthetic oligonucleotide
  misc_feature 1..20: note = Target: ANGPTL4; (-) strand; PAM type: NRG; PAM sequence: CAG
  source 1..20: mol_type = other DNA
tgaggtttcaccacattggc

SEQ ID NO: 9258 - DNA, 20 bp, synthetic construct
  misc_feature 1..20: note = Description of Artificial Sequence: Synthetic oligonucleotide
  misc_feature 1..20: note = Target: ANGPTL4; (-) strand; PAM type: NRG; PAM sequence: TGG
  source 1..20: mol_type = other DNA
gaaatgaggtttcaccacat

SEQ ID NO: 9259 - DNA, 20 bp, synthetic construct
  misc_feature 1..20: note = Description of Artificial Sequence: Synthetic oligonucleotide
  misc_feature 1..20: note = Target: ANGPTL4; (-) strand; PAM type: NRG; PAM sequence: AGG
  source 1..20: mol_type = other DNA
ttgtatttttagtagaaatg

SEQ ID NO: 9260 - DNA, 20 bp, synthetic construct
  misc_feature 1..20: note = Description of Artificial Sequence: Synthetic oligonucleotide
  misc_feature 1..20: note = Target: ANGPTL4; (-) strand; PAM type: NRG; PAM sequence: GAG
  source 1..20: mol_type = other DNA
tttgtatttttagtagaaat

SEQ ID NO: 9261 - DNA, 20 bp, synthetic construct
  misc_feature 1..20: note = Description of Artificial Sequence: Synthetic oligonucleotide
  misc_feature 1..20: note = Target: ANGPTL4; (-) strand; PAM type: NRG; PAM sequence: TAG
  source 1..20: mol_type = other DNA
gctaatttttgtatttttag

SEQ ID NO: 9262 - DNA, 20 bp, synthetic construct
  misc_feature 1..20: note = Description of Artificial Sequence: Synthetic oligonucleotide
  misc_feature 1..20: note = Target: ANGPTL4; (-) strand; PAM type: NRG; PAM sequence: TAG
  source 1..20: mol_type = other DNA
ccagctaatttttgtatttt

SEQ ID NO: 9263 - DNA, 20 bp, synthetic construct
  misc_feature 1..20: note = Description of Artificial Sequence: Synthetic oligonucleotide
  misc_feature 1..20: note = Target: ANGPTL4; (-) strand; PAM type: NRG; PAM sequence: CAG
  source 1..20: mol_type = other DNA
taggtgcgcatcactatgcc

SEQ ID NO: 9264 - DNA, 20 bp, synthetic construct
  misc_feature 1..20: note = Description of Artificial Sequence: Synthetic oligonucleotide
  misc_feature 1..20: note = Target: ANGPTL4; (-) strand; PAM type: NRG; PAM sequence: AGG
  source 1..20: mol_type = other DNA
tcctgagtagctgggattat

SEQ ID NO: 9265 - DNA, 20 bp, synthetic construct
  misc_feature 1..20: note = Description of Artificial Sequence: Synthetic oligonucleotide
  misc_feature 1..20: note = Target: ANGPTL4; (-) strand; PAM type: NRG; PAM sequence: TAG
  source 1..20: mol_type = other DNA
ctcctgagtagctgggatta

SEQ ID NO: 9266 - DNA, 20 bp, synthetic construct
  misc_feature 1..20: note = Description of Artificial Sequence: Synthetic oligonucleotide
  misc_feature 1..20: note = Target: ANGPTL4; (-) strand; PAM type: NRG; PAM sequence: GGG
  source 1..20: mol_type = other DNA
cctcagcctcctgagtagct

SEQ ID NO: 9267 - DNA, 20 bp, synthetic construct
  misc_feature 1..20: note = Description of Artificial Sequence: Synthetic oligonucleotide
  misc_feature 1..20: note = Target: ANGPTL4; (-) strand; PAM type: NRG; PAM sequence: TGG
  source 1..20: mol_type = other DNA
gcctcagcctcctgagtagc

SEQ ID NO: 9268 - DNA, 20 bp, synthetic construct
  misc_feature 1..20: note = Description of Artificial Sequence: Synthetic oligonucleotide
  misc_feature 1..20: note = Target: ANGPTL4; (-) strand; PAM type: NRG; PAM sequence: TAG
  source 1..20: mol_type = other DNA
tccggcctcagcctcctgag

SEQ ID NO: 9269 - DNA, 20 bp, synthetic construct
  misc_feature 1..20: note = Description of Artificial Sequence: Synthetic oligonucleotide
  misc_feature 1..20: note = Target: ANGPTL4; (-) strand; PAM type: NRG; PAM sequence: GAG
  source 1..20: mol_type = other DNA
ttctccggcctcagcctcct

SEQ ID NO: 9270 - DNA, 20 bp, synthetic construct
  misc_feature 1..20: note = Description of Artificial Sequence: Synthetic oligonucleotide
  misc_feature 1..20: note = Target: ANGPTL4; (-) strand; PAM type: NRG; PAM sequence: CAG
  source 1..20: mol_type = other DNA
ttcaagcaattctccggcct

SEQ ID NO: 9271 - DNA, 20 bp, synthetic construct
  misc_feature 1..20: note = Description of Artificial Sequence: Synthetic oligonucleotide
  misc_feature 1..20: note = Target: ANGPTL4; (-) strand; PAM type: NRG; PAM sequence: CGG
  source 1..20: mol_type = other DNA
cctgggttcaagcaattctc

SEQ ID NO: 9272 - DNA, 20 bp, synthetic construct
  misc_feature 1..20: note = Description of Artificial Sequence: Synthetic oligonucleotide
  misc_feature 1..20: note = Target: ANGPTL4; (-) strand; PAM type: NRG; PAM sequence: AAG
  source 1..20: mol_type = other DNA
aacctccacctcctgggttc

SEQ ID NO: 9273 - DNA, 20 bp, synthetic construct
  misc_feature 1..20: note = Description of Artificial Sequence: Synthetic oligonucleotide
  misc_feature 1..20: note = Target: ANGPTL4; (-) strand; PAM type: NRG; PAM sequence: GGG
  source 1..20: mol_type = other DNA
cactgcaacctccacctcct

SEQ ID NO: 9274 - DNA, 20 bp, synthetic construct
  misc_feature 1..20: note = Description of Artificial Sequence: Synthetic oligonucleotide
  misc_feature 1..20: note = Target: ANGPTL4; (-) strand; PAM type: NRG; PAM sequence: TGG
  source 1..20: mol_type = other DNA
tcactgcaacctccacctcc

SEQ ID NO: 9275 - DNA, 20 bp, synthetic construct
  misc_feature 1..20: note = Description of Artificial Sequence: Synthetic oligonucleotide
  misc_feature 1..20: note = Target: ANGPTL4; (-) strand; PAM type: NRG; PAM sequence: CGG
  source 1..20: mol_type = other DNA
gtcacctctcagcgccatct

SEQ ID NO: 9276 - DNA, 20 bp, synthetic construct
  misc_feature 1..20: note = Description of Artificial Sequence: Synthetic oligonucleotide
  misc_feature 1..20: note = Target: ANGPTL4; (-) strand; PAM type: NRG; PAM sequence: CAG
  source 1..20: mol_type = other DNA
gccagcacgctgtcacctct

SEQ ID NO: 9277 - DNA, 20 bp, synthetic construct
  misc_feature 1..20: note = Description of Artificial Sequence: Synthetic oligonucleotide
  misc_feature 1..20: note = Target: ANGPTL4; (-) strand; PAM type: NRG; PAM sequence: CAG
  source 1..20: mol_type = other DNA
gcgagggctgtgaggactgc

SEQ ID NO: 9278 - DNA, 20 bp, synthetic construct
  misc_feature 1..20: note = Description of Artificial Sequence: Synthetic oligonucleotide
  misc_feature 1..20: note = Target: ANGPTL4; (-) strand; PAM type: NRG; PAM sequence: AGG
  source 1..20: mol_type = other DNA
gagagtgagcgagggctgtg

SEQ ID NO: 9279 - DNA, 20 bp, synthetic construct
  misc_feature 1..20: note = Description of Artificial Sequence: Synthetic oligonucleotide
  misc_feature 1..20: note = Target: ANGPTL4; (-) strand; PAM type: NRG; PAM sequence: GAG
  source 1..20: mol_type = other DNA
agagagtgagcgagggctgt

SEQ ID NO: 9280 - DNA, 20 bp, synthetic construct
  misc_feature 1..20: note = Description of Artificial Sequence: Synthetic oligonucleotide
  misc_feature 1..20: note = Target: ANGPTL4; (-) strand; PAM type: NRG; PAM sequence: GGG
  source 1..20: mol_type = other DNA
gagtcgcagagagtgagcga

SEQ ID NO: 9281 - DNA, 20 bp, synthetic construct
  misc_feature 1..20: note = Description of Artificial Sequence: Synthetic oligonucleotide
  misc_feature 1..20: note = Target: ANGPTL4; (-) strand; PAM type: NRG; PAM sequence: AGG
  source 1..20: mol_type = other DNA
ggagtcgcagagagtgagcg

SEQ ID NO: 9282 - DNA, 20 bp, synthetic construct
  misc_feature 1..20: note = Description of Artificial Sequence: Synthetic oligonucleotide
  misc_feature 1..20: note = Target: ANGPTL4; (-) strand; PAM type: NRG; PAM sequence: GAG
  source 1..20: mol_type = other DNA
aggagtcgcagagagtgagc

SEQ ID NO: 9283 - DNA, 20 bp, synthetic construct
  misc_feature 1..20: note = Description of Artificial Sequence: Synthetic oligonucleotide
  misc_feature 1..20: note = Target: ANGPTL4; (-) strand; PAM type: NRG; PAM sequence: GAG
  source 1..20: mol_type = other DNA
gcagaggagtcgcagagagt

SEQ ID NO: 9284 - DNA, 20 bp, synthetic construct
  misc_feature 1..20: note = Description of Artificial Sequence: Synthetic oligonucleotide
  misc_feature 1..20: note = Target: ANGPTL4; (-) strand; PAM type: NRG; PAM sequence: GAG
  source 1..20: mol_type = other DNA
ccaggcagaggagtcgcaga

SEQ ID NO: 9285 - DNA, 20 bp, synthetic construct
  misc_feature 1..20: note = Description of Artificial Sequence: Synthetic oligonucleotide
  misc_feature 1..20: note = Target: ANGPTL4; (-) strand; PAM type: NRG; PAM sequence: GAG
  source 1..20: mol_type = other DNA
gcccaggcagaggagtcgca

SEQ ID NO: 9286 - DNA, 20 bp, synthetic construct
  misc_feature 1..20: note = Description of Artificial Sequence: Synthetic oligonucleotide
  misc_feature 1..20: note = Target: ANGPTL4; (-) strand; PAM type: NRG; PAM sequence: CAG
  source 1..20: mol_type = other DNA
gagcccaggcagaggagtcg

SEQ ID NO: 9287 - DNA, 20 bp, synthetic construct
  misc_feature 1..20: note = Description of Artificial Sequence: Synthetic oligonucleotide
  misc_feature 1..20: note = Target: ANGPTL4; (-) strand; PAM type: NRG; PAM sequence: GAG
  source 1..20: mol_type = other DNA
cagtgggagcccaggcagag

SEQ ID NO: 9288 - DNA, 20 bp, synthetic construct
  misc_feature 1..20: note = Description of Artificial Sequence: Synthetic oligonucleotide
  misc_feature 1..20: note = Target: ANGPTL4; (-) strand; PAM type: NRG; PAM sequence: AGG
  source 1..20: mol_type = other DNA
cacagtgggagcccaggcag

SEQ ID NO: 9289 - DNA, 20 bp, synthetic construct
  misc_feature 1..20: note = Description of Artificial Sequence: Synthetic oligonucleotide
  misc_feature 1..20: note = Target: ANGPTL4; (-) strand; PAM type: NRG; PAM sequence: GAG
  source 1..20: mol_type = other DNA
ccacagtgggagcccaggca

SEQ ID NO: 9290 - DNA, 20 bp, synthetic construct
  misc_feature 1..20: note = Description of Artificial Sequence: Synthetic oligonucleotide
  misc_feature 1..20: note = Target: ANGPTL4; (-) strand; PAM type: NRG; PAM sequence: CAG
  source 1..20: mol_type = other DNA
cgccacagtgggagcccagg

SEQ ID NO: 9291 - DNA, 20 bp, synthetic construct
  misc_feature 1..20: note = Description of Artificial Sequence: Synthetic oligonucleotide
  misc_feature 1..20: note = Target: ANGPTL4; (-) strand; PAM type: NRG; PAM sequence: AGG
  source 1..20: mol_type = other DNA
tgccgccacagtgggagccc

SEQ ID NO: 9292 - DNA, 20 bp, synthetic construct
  misc_feature 1..20: note = Description of Artificial Sequence: Synthetic oligonucleotide
  misc_feature 1..20: note = Target: ANGPTL4; (-) strand; PAM type: NRG; PAM sequence: CAG
  source 1..20: mol_type = other DNA
gtgccgccacagtgggagcc

SEQ ID NO: 9293 - DNA, 20 bp, synthetic construct
  misc_feature 1..20: note = Description of Artificial Sequence: Synthetic oligonucleotide
  misc_feature 1..20: note = Target: ANGPTL4; (-) strand; PAM type: NRG; PAM sequence: GAG
  source 1..20: mol_type = other DNA
ctgaagtgccgccacagtgg

SEQ ID NO: 9294 - DNA, 20 bp, synthetic construct
  misc_feature 1..20: note = Description of Artificial Sequence: Synthetic oligonucleotide
  misc_feature 1..20: note = Target: ANGPTL4; (-) strand; PAM type: NRG; PAM sequence: GGG
  source 1..20: mol_type = other DNA
tcctgaagtgccgccacagt

SEQ ID NO: 9295 - DNA, 20 bp, synthetic construct
  misc_feature 1..20: note = Description of Artificial Sequence: Synthetic oligonucleotide
  misc_feature 1..20: note = Target: ANGPTL4; (-) strand; PAM type: NRG; PAM sequence: TGG
  source 1..20: mol_type = other DNA
ctcctgaagtgccgccacag

SEQ ID NO: 9296 - DNA, 20 bp, synthetic construct
  misc_feature 1..20: note = Description of Artificial Sequence: Synthetic oligonucleotide
  misc_feature 1..20: note = Target: ANGPTL4; (-) strand; PAM type: NRG; PAM sequence: CAG
  source 1..20: mol_type = other DNA
gggctcctgaagtgccgcca

SEQ ID NO: 9297 - DNA, 20 bp, synthetic construct
  misc_feature 1..20: note = Description of Artificial Sequence: Synthetic oligonucleotide
  misc_feature 1..20: note = Target: ANGPTL4; (-) strand; PAM type: NRG; PAM sequence: AAG
  source 1..20: mol_type = other DNA
ggtgggctgaagggctcctg

SEQ ID NO: 9298 - DNA, 20 bp, synthetic construct
  misc_feature 1..20: note = Description of Artificial Sequence: Synthetic oligonucleotide
  misc_feature 1..20: note = Target: ANGPTL4; (-) strand; PAM type: NRG; PAM sequence: GGG
  source 1..20: mol_type = other DNA
cagtgcagcggtgggctgaa

SEQ ID NO: 9299 - DNA, 20 bp, synthetic construct
  misc_feature 1..20: note = Description of Artificial Sequence: Synthetic oligonucleotide
  misc_feature 1..20: note = Target: ANGPTL4; (-) strand; PAM type: NRG; PAM sequence: AGG
  source 1..20: mol_type = other DNA
acagtgcagcggtgggctga

SEQ ID NO: 9300 - DNA, 20 bp, synthetic construct
  misc_feature 1..20: note = Description of Artificial Sequence: Synthetic oligonucleotide
  misc_feature 1..20: note = Target: ANGPTL4; (-) strand; PAM type: NRG; PAM sequence: AAG
  source 1..20: mol_type = other DNA
cacagtgcagcggtgggctg

SEQ ID NO: 9301 - DNA, 20 bp, synthetic construct
  misc_feature 1..20: note = Description of Artificial Sequence: Synthetic oligonucleotide
  misc_feature 1..20: note = Target: ANGPTL4; (-) strand; PAM type: NRG; PAM sequence: GGG
  source 1..20: mol_type = other DNA
ggctcccacagtgcagcggt

SEQ ID NO: 9302 - DNA, 20 bp, synthetic construct
  misc_feature 1..20: note = Description of Artificial Sequence: Synthetic oligonucleotide
  misc_feature 1..20: note = Target: ANGPTL4; (-) strand; PAM type: NRG; PAM sequence: TGG
  source 1..20: mol_type = other DNA
gggctcccacagtgcagcgg

SEQ ID NO: 9303 - DNA, 20 bp, synthetic construct
  misc_feature 1..20: note = Description of Artificial Sequence: Synthetic oligonucleotide
  misc_feature 1..20: note = Target: ANGPTL4; (-) strand; PAM type: NRG; PAM sequence: CGG
  source 1..20: mol_type = other DNA
aaggggctcccacagtgcag

SEQ ID NO: 9304 - DNA, 20 bp, synthetic construct
  misc_feature 1..20: note = Description of Artificial Sequence: Synthetic oligonucleotide
  misc_feature 1..20: note = Target: ANGPTL4; (-) strand; PAM type: NRG; PAM sequence: CAG
  source 1..20: mol_type = other DNA
agaaaggggctcccacagtg

SEQ ID NO: 9305 - DNA, 20 bp, synthetic construct
  misc_feature 1..20: note = Description of Artificial Sequence: Synthetic oligonucleotide
  misc_feature 1..20: note = Target: ANGPTL4; (-) strand; PAM type: NRG; PAM sequence: CAG
  source 1..20: mol_type = other DNA
agcccagaaaggggctccca

SEQ ID NO: 9306 - DNA, 20 bp, synthetic construct
  misc_feature 1..20: note = Description of Artificial Sequence: Synthetic oligonucleotide
  misc_feature 1..20: note = Target: ANGPTL4; (-) strand; PAM type: NRG; PAM sequence: GGG
  source 1..20: mol_type = other DNA
gccttggccagcccagaaag

SEQ ID NO: 9307 - DNA, 20 bp, synthetic construct
  misc_feature 1..20: note = Description of Artificial Sequence: Synthetic oligonucleotide
  misc_feature 1..20: note = Target: ANGPTL4; (-) strand; PAM type: NRG; PAM sequence: GGG
  source 1..20: mol_type = other DNA
ggccttggccagcccagaaa

SEQ ID NO: 9308 - DNA, 20 bp, synthetic construct
  misc_feature 1..20: note = Description of Artificial Sequence: Synthetic oligonucleotide
  misc_feature 1..20: note = Target: ANGPTL4; (-) strand; PAM type: NRG; PAM sequence: AGG
  source 1..20: mol_type = other DNA
cggccttggccagcccagaa

SEQ ID NO: 9309 - DNA, 20 bp, synthetic construct
  misc_feature 1..20: note = Description of Artificial Sequence: Synthetic oligonucleotide
  misc_feature 1..20: note = Target: ANGPTL4; (-) strand; PAM type: NRG; PAM sequence: AAG
  source 1..20: mol_type = other DNA
ccggccttggccagcccaga

SEQ ID NO: 9310 - DNA, 20 bp, synthetic construct
  misc_feature 1..20: note = Description of Artificial Sequence: Synthetic oligonucleotide
  misc_feature 1..20: note = Target: ANGPTL4; (-) strand; PAM type: NRG; PAM sequence: CAG
  source 1..20: mol_type = other DNA
agctccggccttggccagcc

SEQ ID NO: 9311 - DNA, 20 bp, synthetic construct
  misc_feature 1..20: note = Description of Artificial Sequence: Synthetic oligonucleotide
  misc_feature 1..20: note = Target: ANGPTL4; (-) strand; PAM type: NRG; PAM sequence: CAG
  source 1..20: mol_type = other DNA
gagccagctccggccttggc

SEQ ID NO: 9312 - DNA, 20 bp, synthetic construct
  misc_feature 1..20: note = Description of Artificial Sequence: Synthetic oligonucleotide
  misc_feature 1..20: note = Target: ANGPTL4; (-) strand; PAM type: NRG; PAM sequence: TGG
  source 1..20: mol_type = other DNA
gagggagccagctccggcct

SEQ ID NO: 9313 - DNA, 20 bp, synthetic construct
  misc_feature 1..20: note = Description of Artificial Sequence: Synthetic oligonucleotide
  misc_feature 1..20: note = Target: ANGPTL4; (-) strand; PAM type: NRG; PAM sequence: CGG
  source 1..20: mol_type = other DNA
caagctgagggagccagctc

SEQ ID NO: 9314 - DNA, 20 bp, synthetic construct
  misc_feature 1..20: note = Description of Artificial Sequence: Synthetic oligonucleotide
  misc_feature 1..20: note = Target: ANGPTL4; (-) strand; PAM type: NRG; PAM sequence: CAG
  source 1..20: mol_type = other DNA
tccctgcaagctgagggagc

SEQ ID NO: 9315 - DNA, 20 bp, synthetic construct
  misc_feature 1..20: note = Description of Artificial Sequence: Synthetic oligonucleotide
  misc_feature 1..20: note = Target: ANGPTL4; (-) strand; PAM type: NRG; PAM sequence: GAG
  source 1..20: mol_type = other DNA
cacttccctgcaagctgagg

SEQ ID NO: 9316 - DNA, 20 bp, synthetic construct
  misc_feature 1..20: note = Description of Artificial Sequence: Synthetic oligonucleotide
  misc_feature 1..20: note = Target: ANGPTL4; (-) strand; PAM type: NRG; PAM sequence: GGG
  source 1..20: mol_type = other DNA
cacacttccctgcaagctga

SEQ ID NO: 9317 - DNA, 20 bp, synthetic construct
  misc_feature 1..20: note = Description of Artificial Sequence: Synthetic oligonucleotide
  misc_feature 1..20: note = Target: ANGPTL4; (-) strand; PAM type: NRG; PAM sequence: AGG
  source 1..20: mol_type = other DNA
ccacacttccctgcaagctg

SEQ ID NO: 9318 - DNA, 20 bp, synthetic construct
  misc_feature 1..20: note = Description of Artificial Sequence: Synthetic oligonucleotide
  misc_feature 1..20: note = Target: ANGPTL4; (-) strand; PAM type: NRG; PAM sequence: GAG
  source 1..20: mol_type = other DNA
tccacacttccctgcaagct

SEQ ID NO: 9319 - DNA, 20 bp, synthetic construct
  misc_feature 1..20: note = Description of Artificial Sequence: Synthetic oligonucleotide
  misc_feature 1..20: note = Target: ANGPTL4; (-) strand; PAM type: NRG; PAM sequence: AAG
  source 1..20: mol_type = other DNA
ctccctccacacttccctgc

SEQ ID NO: 9320 - DNA, 20 bp, synthetic construct
  misc_feature 1..20: note = Description of Artificial Sequence: Synthetic oligonucleotide
  misc_feature 1..20: note = Target: ANGPTL4; (-) strand; PAM type: NRG; PAM sequence: CGG
  source 1..20: mol_type = other DNA
accgcgcgcagccccgattc

SEQ ID NO: 9321 - DNA, 20 bp, synthetic construct
  misc_feature 1..20: note = Description of Artificial Sequence: Synthetic oligonucleotide
  misc_feature 1..20: note = Target: ANGPTL4; (-) strand; PAM type: NRG; PAM sequence: CAG
  source 1..20: mol_type = other DNA
tggcccacaagcaccgcgcg

SEQ ID NO: 9322 - DNA, 20 bp, synthetic construct
  misc_feature 1..20: note = Description of Artificial Sequence: Synthetic oligonucleotide
  misc_feature 1..20: note = Target: ANGPTL4; (-) strand; PAM type: NRG; PAM sequence: AAG
  source 1..20: mol_type = other DNA
cggaactccagctggcccac

SEQ ID NO: 9323 - DNA, 20 bp, synthetic construct
  misc_feature 1..20: note = Description of Artificial Sequence: Synthetic oligonucleotide
  misc_feature 1..20: note = Target: ANGPTL4; (-) strand; PAM type: NRG; PAM sequence: TGG
  source 1..20: mol_type = other DNA
cgcccacccggaactccagc

SEQ ID NO: 9324 - DNA, 20 bp, synthetic construct
  misc_feature 1..20: note = Description of Artificial Sequence: Synthetic oligonucleotide
  misc_feature 1..20: note = Target: ANGPTL4; (-) strand; PAM type: NRG; PAM sequence: CAG
  source 1..20: mol_type = other DNA
cccacgcccacccggaactc

SEQ ID NO: 9325 - DNA, 20 bp, synthetic construct
  misc_feature 1..20: note = Description of Artificial Sequence: Synthetic oligonucleotide
  misc_feature 1..20: note = Target: ANGPTL4; (-) strand; PAM type: NRG; PAM sequence: CGG
  source 1..20: mol_type = other DNA
ccgccaagcccacgcccacc

SEQ ID NO: 9326 - DNA, 20 bp, synthetic construct
  misc_feature 1..20: note = Description of Artificial Sequence: Synthetic oligonucleotide
  misc_feature 1..20: note = Target: ANGPTL4; (-) strand; PAM type: NRG; PAM sequence: AAG
  source 1..20: mol_type = other DNA
ctctgagtgcagggtccgcc

SEQ ID NO: 9327 - DNA, 20 bp, synthetic construct
  misc_feature 1..20: note = Description of Artificial Sequence: Synthetic oligonucleotide
  misc_feature 1..20: note = Target: ANGPTL4; (-) strand; PAM type: NRG; PAM sequence: GGG
  source 1..20: mol_type = other DNA
ggacggctgctctgagtgca

SEQ ID NO: 9328 - DNA, 20 bp, synthetic construct
  misc_feature 1..20: note = Description of Artificial Sequence: Synthetic oligonucleotide
  misc_feature 1..20: note = Target: ANGPTL4; (-) strand; PAM type: NRG; PAM sequence: AGG
  source 1..20: mol_type = other DNA
cggacggctgctctgagtgc

SEQ ID NO: 9329 - DNA, 20 bp, synthetic construct
  misc_feature 1..20: note = Description of Artificial Sequence: Synthetic oligonucleotide
  misc_feature 1..20: note = Target: ANGPTL4; (-) strand; PAM type: NRG; PAM sequence: CAG
  source 1..20: mol_type = other DNA
ccggacggctgctctgagtg

SEQ ID NO: 9330 - DNA, 20 bp, synthetic construct
  misc_feature 1..20: note = Description of Artificial Sequence: Synthetic oligonucleotide
  misc_feature 1..20: note = Target: ANGPTL4; (-) strand; PAM type: NRG; PAM sequence: GAG
  source 1..20: mol_type = other DNA
cagggccggacggctgctct

SEQ ID NO: 9331 - DNA, 20 bp, synthetic construct
  misc_feature 1..20: note = Description of Artificial Sequence: Synthetic oligonucleotide
  misc_feature 1..20: note = Target: ANGPTL4; (-) strand; PAM type: NRG; PAM sequence: CGG
  source 1..20: mol_type = other DNA
ccggggccagcagggccgga

SEQ ID NO: 9332 - DNA, 20 bp, synthetic construct
  misc_feature 1..20: note = Description of Artificial Sequence: Synthetic oligonucleotide
  misc_feature 1..20: note = Target: ANGPTL4; (-) strand; PAM type: NRG; PAM sequence: CGG
  source 1..20: mol_type = other DNA
ttgcccggggccagcagggc

SEQ ID NO: 9333 - DNA, 20 bp, synthetic construct
  misc_feature 1..20: note = Description of Artificial Sequence: Synthetic oligonucleotide
  misc_feature 1..20: note = Target: ANGPTL4; (-) strand; PAM type: NRG; PAM sequence: GGG
  source 1..20: mol_type = other DNA
ctcattgcccggggccagca

SEQ ID NO: 9334 - DNA, 20 bp, synthetic construct
  misc_feature 1..20: note = Description of Artificial Sequence: Synthetic oligonucleotide
  misc_feature 1..20: note = Target: ANGPTL4; (-) strand; PAM type: NRG; PAM sequence: AGG
  source 1..20: mol_type = other DNA
cctcattgcccggggccagc

SEQ ID NO: 9335 - DNA, 20 bp, synthetic construct
  misc_feature 1..20: note = Description of Artificial Sequence: Synthetic oligonucleotide
  misc_feature 1..20: note = Target: ANGPTL4; (-) strand; PAM type: NRG; PAM sequence: CAG
  source 1..20: mol_type = other DNA
ccctcattgcccggggccag

SEQ ID NO: 9336 - DNA, 20 bp, synthetic construct
  misc_feature 1..20: note = Description of Artificial Sequence: Synthetic oligonucleotide
  misc_feature 1..20: note = Target: ANGPTL4; (-) strand; PAM type: NRG; PAM sequence: CAG
  source 1..20: mol_type = other DNA
agcccctcattgcccggggc

SEQ ID NO: 9337 - DNA, 20 bp, synthetic construct
  misc_feature 1..20: note = Description of Artificial Sequence: Synthetic oligonucleotide
  misc_feature 1..20: note = Target: ANGPTL4; (-) strand; PAM type: NRG; PAM sequence: GGG
  source 1..20: mol_type = other DNA
gctaagcccctcattgcccg

SEQ ID NO: 9338 - DNA, 20 bp, synthetic construct
  misc_feature 1..20: note = Description of Artificial Sequence: Synthetic oligonucleotide
  misc_feature 1..20: note = Target: ANGPTL4; (-) strand; PAM type: NRG; PAM sequence: GGG
  source 1..20: mol_type = other DNA
tgctaagcccctcattgccc

SEQ ID NO: 9339 - DNA, 20 bp, synthetic construct
  misc_feature 1..20: note = Description of Artificial Sequence: Synthetic oligonucleotide
  misc_feature 1..20: note = Target: ANGPTL4; (-) strand; PAM type: NRG; PAM sequence: CGG
  source 1..20: mol_type = other DNA
gtgctaagcccctcattgcc

SEQ ID NO: 9340 - DNA, 20 bp, synthetic construct
  misc_feature 1..20: note = Description of Artificial Sequence: Synthetic oligonucleotide
  misc_feature 1..20: note = Target: ANGPTL4; (-) strand; PAM type: NRG; PAM sequence: AAG
  source 1..20: mol_type = other DNA
cgctgtccggcccgggtgct

SEQ ID NO: 9341 - DNA, 20 bp, synthetic construct
  misc_feature 1..20: note = Description of Artificial Sequence: Synthetic oligonucleotide
  misc_feature 1..20: note = Target: ANGPTL4; (-) strand; PAM type: NRG; PAM sequence: GGG
  source 1..20: mol_type = other DNA
ccgcagccgctgtccggccc

SEQ ID NO: 9342 - DNA, 20 bp, synthetic construct
  misc_feature 1..20: note = Description of Artificial Sequence: Synthetic oligonucleotide
  misc_feature 1..20: note = Target: ANGPTL4; (-) strand; PAM type: NRG; PAM sequence: CGG
  source 1..20: mol_type = other DNA
tccgcagccgctgtccggcc

SEQ ID NO: 9343 - DNA, 20 bp, synthetic construct
  misc_feature 1..20: note = Description of Artificial Sequence: Synthetic oligonucleotide
  misc_feature 1..20: note = Target: ANGPTL4; (-) strand; PAM type: NRG; PAM sequence: CGG
  source 1..20: mol_type = other DNA
caccctccgcagccgctgtc

SEQ ID NO: 9344 - DNA, 20 bp, synthetic construct
  misc_feature 1..20: note = Description of Artificial Sequence: Synthetic oligonucleotide
  misc_feature 1..20: note = Target: ANGPTL4; (-) strand; PAM type: NRG; PAM sequence: CAG
  source 1..20: mol_type = other DNA
gggacccagtacaccctccg

SEQ ID NO: 9345 - DNA, 20 bp, synthetic construct
  misc_feature 1..20: note = Description of Artificial Sequence: Synthetic oligonucleotide
  misc_feature 1..20: note = Target: ANGPTL4; (-) strand; PAM type: NRG; PAM sequence: CAG
  source 1..20: mol_type = other DNA
gctggcactgctgggggacc

SEQ ID NO: 9346 - DNA, 20 bp, synthetic construct
  misc_feature 1..20: note = Description of Artificial Sequence: Synthetic oligonucleotide
  misc_feature 1..20: note = Target: ANGPTL4; (-) strand; PAM type: NRG; PAM sequence: GGG
  source 1..20: mol_type = other DNA
cggtgcgctggcactgctgg

SEQ ID NO: 9347 - DNA, 20 bp, synthetic construct
  misc_feature 1..20: note = Description of Artificial Sequence: Synthetic oligonucleotide
  misc_feature 1..20: note = Target: ANGPTL4; (-) strand; PAM type: NRG; PAM sequence: GGG
  source 1..20: mol_type = other DNA
ccggtgcgctggcactgctg

SEQ ID NO: 9348 - DNA, 20 bp, synthetic construct
  misc_feature 1..20: note = Description of Artificial Sequence: Synthetic oligonucleotide
  misc_feature 1..20: note = Target: ANGPTL4; (-) strand; PAM type: NRG; PAM sequence: GGG
  source 1..20: mol_type = other DNA
gccggtgcgctggcactgct

SEQ ID NO: 9349 - DNA, 20 bp, synthetic construct
  misc_feature 1..20: note = Description of Artificial Sequence: Synthetic oligonucleotide
  misc_feature 1..20: note = Target: ANGPTL4; (-) strand; PAM type: NRG; PAM sequence: TGG
  source 1..20: mol_type = other DNA
cgccggtgcgctggcactgc

SEQ ID NO: 9350 - DNA, 20 bp, synthetic construct
  misc_feature 1..20: note = Description of Artificial Sequence: Synthetic oligonucleotide
  misc_feature 1..20: note = Target: ANGPTL4; (-) strand; PAM type: NRG; PAM sequence: TGG
  source 1..20: mol_type = other DNA
caagcgcagcgccggtgcgc

SEQ ID NO: 9351 - DNA, 20 bp, synthetic construct
  misc_feature 1..20: note = Description of Artificial Sequence: Synthetic oligonucleotide
  misc_feature 1..20: note = Target: ANGPTL4; (-) strand; PAM type: NRG; PAM sequence: CGG
  source 1..20: mol_type = other DNA
tgagaaatcaagcgcagcgc

SEQ ID NO: 9352 - DNA, 20 bp, synthetic construct
  misc_feature 1..20: note = Description of Artificial Sequence: Synthetic oligonucleotide
  misc_feature 1..20: note = Target: ANGPTL4; (-) strand; PAM type: NRG; PAM sequence: CAG
  source 1..20: mol_type = other DNA
gcctggtgagaaatcaagcg

SEQ ID NO: 9353 - DNA, 20 bp, synthetic construct
  misc_feature 1..20: note = Description of Artificial Sequence: Synthetic oligonucleotide
  misc_feature 1..20: note = Target: ANGPTL4; (-) strand; PAM type: NRG; PAM sequence: AAG
  source 1..20: mol_type = other DNA
ctaaggcctggtgagaaatc

SEQ ID NO: 9354 - DNA, 20 bp, synthetic construct
  misc_feature 1..20: note = Description of Artificial Sequence: Synthetic oligonucleotide
  misc_feature 1..20: note = Target: ANGPTL4; (-) strand; PAM type: NRG; PAM sequence: GAG
  source 1..20: mol_type = other DNA
gaaggcagctaaggcctggt

SEQ ID NO: 9355 - DNA, 20 bp, synthetic construct
  misc_feature 1..20: note = Description of Artificial Sequence: Synthetic oligonucleotide
  misc_feature 1..20: note = Target: ANGPTL4; (-) strand; PAM type: NRG; PAM sequence: TGG
  source 1..20: mol_type = other DNA
gcgggaaggcagctaaggcc

SEQ ID NO: 9356 - DNA, 20 bp, synthetic construct
  misc_feature 1..20: note = Description of Artificial Sequence: Synthetic oligonucleotide
  misc_feature 1..20: note = Target: ANGPTL4; (-) strand; PAM type: NRG; PAM sequence: AGG
  source 1..20: mol_type = other DNA
gccccgcgggaaggcagcta

SEQ ID NO: 9357 - DNA, 20 bp, synthetic construct
  misc_feature 1..20: note = Description of Artificial Sequence: Synthetic oligonucleotide
  misc_feature 1..20: note = Target: ANGPTL4; (-) strand; PAM type: NRG; PAM sequence: AAG
  source 1..20: mol_type = other DNA
tgccccgcgggaaggcagct

SEQ ID NO: 9358 - DNA, 20 bp, synthetic construct
  misc_feature 1..20: note = Description of Artificial Sequence: Synthetic oligonucleotide
  misc_feature 1..20: note = Target: ANGPTL4; (-) strand; PAM type: NRG; PAM sequence: CAG
  source 1..20: mol_type = other DNA
atccctgccccgcgggaagg

SEQ ID NO: 9359 - DNA, 20 bp, synthetic construct
  misc_feature 1..20: note = Description of Artificial Sequence: Synthetic oligonucleotide
  misc_feature 1..20: note = Target: ANGPTL4; (-) strand; PAM type: NRG; PAM sequence: AGG
  source 1..20: mol_type = other DNA
ccgatccctgccccgcggga

SEQ ID NO: 9360 - DNA, 20 bp, synthetic construct
  misc_feature 1..20: note = Description of Artificial Sequence: Synthetic oligonucleotide
  misc_feature 1..20: note = Target: ANGPTL4; (-) strand; PAM type: NRG; PAM sequence: AAG
  source 1..20: mol_type = other DNA
cccgatccctgccccgcggg

SEQ ID NO: 9361 - DNA, 20 bp, synthetic construct
  misc_feature 1..20: note = Description of Artificial Sequence: Synthetic oligonucleotide
  misc_feature 1..20: note = Target: ANGPTL4; (-) strand; PAM type: NRG; PAM sequence: GGG
  source 1..20: mol_type = other DNA
ggtcccgatccctgccccgc

SEQ ID NO: 9362 - DNA, 20 bp, synthetic construct
  misc_feature 1..20: note = Description of Artificial Sequence: Synthetic oligonucleotide
  misc_feature 1..20: note = Target: ANGPTL4; (-) strand; PAM type: NRG; PAM sequence: CGG
  source 1..20: mol_type = other DNA
aggtcccgatccctgccccg

SEQ ID NO: 9363 - DNA, 20 bp, synthetic construct
  misc_feature 1..20: note = Description of Artificial Sequence: Synthetic oligonucleotide
  misc_feature 1..20: note = Target: ANGPTL4; (-) strand; PAM type: NRG; PAM sequence: AGG
  source 1..20: mol_type = other DNA
gctcaggcatggcgggctgc

SEQ ID NO: 9364 - DNA, 20 bp, synthetic construct
  misc_feature 1..20: note = Description of Artificial Sequence: Synthetic oligonucleotide
  misc_feature 1..20: note = Target: ANGPTL4; (-) strand; PAM type: NRG; PAM sequence: CAG
  source 1..20: mol_type = other DNA
ggctcaggcatggcgggctg

SEQ ID NO: 9365 - DNA, 20 bp, synthetic construct
  misc_feature 1..20: note = Description of Artificial Sequence: Synthetic oligonucleotide
  misc_feature 1..20: note = Target: ANGPTL4; (-) strand; PAM type: NRG; PAM sequence: GGG
  source 1..20: mol_type = other DNA
gtgggaggctcaggcatggc

SEQ ID NO: 9366 - DNA, 20 bp, synthetic construct
  misc_feature 1..20: note = Description of Artificial Sequence: Synthetic oligonucleotide
  misc_feature 1..20: note = Target: ANGPTL4; (-) strand; PAM type: NRG; PAM sequence: CGG
  source 1..20: mol_type = other DNA
ggtgggaggctcaggcatgg

SEQ ID NO: 9367 - DNA, 20 bp, synthetic construct
  misc_feature 1..20: note = Description of Artificial Sequence: Synthetic oligonucleotide
  misc_feature 1..20: note = Target: ANGPTL4; (-) strand; PAM type: NRG; PAM sequence: TGG
  source 1..20: mol_type = other DNA
gggggtgggaggctcaggca

SEQ ID NO: 9368 - DNA, 20 bp, synthetic construct
  misc_feature 1..20: note = Description of Artificial Sequence: Synthetic oligonucleotide
  misc_feature 1..20: note = Target: ANGPTL4; (-) strand; PAM type: NRG; PAM sequence: AGG
  source 1..20: mol_type = other DNA
atggagggggtgggaggctc

SEQ ID NO: 9369 - DNA, 20 bp, synthetic construct
  misc_feature 1..20: note = Description of Artificial Sequence: Synthetic oligonucleotide
  misc_feature 1..20: note = Target: ANGPTL4; (-) strand; PAM type: NRG; PAM sequence: CAG
  source 1..20: mol_type = other DNA
catggagggggtgggaggct

SEQ ID NO: 9370 - DNA, 20 bp, synthetic construct
  misc_feature 1..20: note = Description of Artificial Sequence: Synthetic oligonucleotide
  misc_feature 1..20: note = Target: ANGPTL4; (-) strand; PAM type: NRG; PAM sequence: AGG
  source 1..20: mol_type = other DNA
gagcccatggagggggtggg

SEQ ID NO: 9371 - DNA, 20 bp, synthetic construct
  misc_feature 1..20: note = Description of Artificial Sequence: Synthetic oligonucleotide
  misc_feature 1..20: note = Target: ANGPTL4; (-) strand; PAM type: NRG; PAM sequence: GAG
  source 1..20: mol_type = other DNA
ggagcccatggagggggtgg

SEQ ID NO: 9372 - DNA, 20 bp, synthetic construct
  misc_feature 1..20: note = Description of Artificial Sequence: Synthetic oligonucleotide
  misc_feature 1..20: note = Target: ANGPTL4; (-) strand; PAM type: NRG; PAM sequence: GGG
  source 1..20: mol_type = other DNA
caggagcccatggagggggt

SEQ ID NO: 9373 - DNA, 20 bp, synthetic construct
  misc_feature 1..20: note = Description of Artificial Sequence: Synthetic oligonucleotide
  misc_feature 1..20: note = Target: ANGPTL4; (-) strand; PAM type: NRG; PAM sequence: TGG
  source 1..20: mol_type = other DNA
acaggagcccatggaggggg

SEQ ID NO: 9374 - DNA, 20 bp, synthetic construct
  misc_feature 1..20: note = Description of Artificial Sequence: Synthetic oligonucleotide
  misc_feature 1..20: note = Target: ANGPTL4; (-) strand; PAM type: NRG; PAM sequence: GGG
  source 1..20: mol_type = other DNA
cgcacaggagcccatggagg

SEQ ID NO: 9375 - DNA, 20 bp, synthetic construct
  misc_feature 1..20: note = Description of Artificial Sequence: Synthetic oligonucleotide
  misc_feature 1..20: note = Target: ANGPTL4; (-) strand; PAM type: NRG; PAM sequence: GGG
  source 1..20: mol_type = other DNA
ccgcacaggagcccatggag

SEQ ID NO: 9376 - DNA, 20 bp, synthetic construct
  misc_feature 1..20: note = Description of Artificial Sequence: Synthetic oligonucleotide
  misc_feature 1..20: note = Target: ANGPTL4; (-) strand; PAM type: NRG; PAM sequence: GGG
  source 1..20: mol_type = other DNA
gccgcacaggagcccatgga

SEQ ID NO: 9377 - DNA, 20 bp, synthetic construct
  misc_feature 1..20: note = Description of Artificial Sequence: Synthetic oligonucleotide
  misc_feature 1..20: note = Target: ANGPTL4; (-) strand; PAM type: NRG; PAM sequence: AGG
  source 1..20: mol_type = other DNA
ggccgcacaggagcccatgg

SEQ ID NO: 9378 - DNA, 20 bp, synthetic construct
  misc_feature 1..20: note = Description of Artificial Sequence: Synthetic oligonucleotide
  misc_feature 1..20: note = Target: ANGPTL4; (-) strand; PAM type: NRG; PAM sequence: GAG
  source 1..20: mol_type = other DNA
gggccgcacaggagcccatg

SEQ ID NO: 9379 - DNA, 20 bp, synthetic construct
  misc_feature 1..20: note = Description of Artificial Sequence: Synthetic oligonucleotide
  misc_feature 1..20: note = Target: ANGPTL4; (-) strand; PAM type: NRG; PAM sequence: TGG
  source 1..20: mol_type = other DNA
gcgggccgcacaggagccca

SEQ ID NO: 9380 - DNA, 20 bp, synthetic construct
  misc_feature 1..20: note = Description of Artificial Sequence: Synthetic oligonucleotide
  misc_feature 1..20: note = Target: ANGPTL4; (-) strand; PAM type: NRG; PAM sequence: GAG
  source 1..20: mol_type = other DNA
gggaggcgcgggccgcacag

SEQ ID NO: 9381 - DNA, 20 bp, synthetic construct
  misc_feature 1..20: note = Description of Artificial Sequence: Synthetic oligonucleotide
  misc_feature 1..20: note = Target: ANGPTL4; (-) strand; PAM type: NRG; PAM sequence: AGG
  source 1..20: mol_type = other DNA
cagggaggcgcgggccgcac

SEQ ID NO: 9382 - DNA, 20 bp, synthetic construct
  misc_feature 1..20: note = Description of Artificial Sequence: Synthetic oligonucleotide
  misc_feature 1..20: note = Target: ANGPTL4; (-) strand; PAM type: NRG; PAM sequence: CAG
  source 1..20: mol_type = other DNA
tcagggaggcgcgggccgca

SEQ ID NO: 9383 - DNA, 20 bp, synthetic construct
  misc_feature 1..20: note = Description of Artificial Sequence: Synthetic oligonucleotide
  misc_feature 1..20: note = Target: ANGPTL4; (-) strand; PAM type: NRG; PAM sequence: GGG
  source 1..20: mol_type = other DNA
agtgctcgtcagggaggcgc

SEQ ID NO: 9384 - DNA, 20 bp, synthetic construct
  misc_feature 1..20: note = Description of Artificial Sequence: Synthetic oligonucleotide
  misc_feature 1..20: note = Target: ANGPTL4; (-) strand; PAM type: NRG; PAM sequence: CGG
  source 1..20: mol_type = other DNA
cagtgctcgtcagggaggcg

SEQ ID NO: 9385 - DNA, 20 bp, synthetic construct
  misc_feature 1..20: note = Description of Artificial Sequence: Synthetic oligonucleotide
  misc_feature 1..20: note = Target: ANGPTL4; (-) strand; PAM type: NRG; PAM sequence: AGG
  source 1..20: mol_type = other DNA
tggggcagtgctcgtcaggg

SEQ ID NO: 9386 - DNA, 20 bp, synthetic construct
  misc_feature 1..20: note = Description of Artificial Sequence: Synthetic oligonucleotide
  misc_feature 1..20: note = Target: ANGPTL4; (-) strand; PAM type: NRG; PAM sequence: GAG
  source 1..20: mol_type = other DNA
atggggcagtgctcgtcagg

SEQ ID NO: 9387 - DNA, 20 bp, synthetic construct
  misc_feature 1..20: note = Description of Artificial Sequence: Synthetic oligonucleotide
  misc_feature 1..20: note = Target: ANGPTL4; (-) strand; PAM type: NRG; PAM sequence: GGG
  source 1..20: mol_type = other DNA
gcatggggcagtgctcgtca

SEQ ID NO: 9388 - DNA, 20 bp, synthetic construct
  misc_feature 1..20: note = Description of Artificial Sequence: Synthetic oligonucleotide
  misc_feature 1..20: note = Target: ANGPTL4; (-) strand; PAM type: NRG; PAM sequence: AGG
  source 1..20: mol_type = other DNA
agcatggggcagtgctcgtc

SEQ ID NO: 9389 - DNA, 20 bp, synthetic construct
  misc_feature 1..20: note = Description of Artificial Sequence: Synthetic oligonucleotide
  misc_feature 1..20: note = Target: ANGPTL4; (-) strand; PAM type: NRG; PAM sequence: CAG
  source 1..20: mol_type = other DNA
gagcatggggcagtgctcgt

SEQ ID NO: 9390 - DNA, 20 bp, synthetic construct
  misc_feature 1..20: note = Description of Artificial Sequence: Synthetic oligonucleotide
  misc_feature 1..20: note = Target: ANGPTL4; (-) strand; PAM type: NRG; PAM sequence: CAG
  source 1..20: mol_type = other DNA
gggcaccatggagcatgggg

SEQ ID NO: 9391 - DNA, 20 bp, synthetic construct
  misc_feature 1..20: note = Description of Artificial Sequence: Synthetic oligonucleotide
  misc_feature 1..20: note = Target: ANGPTL4; (-) strand; PAM type: NRG; PAM sequence: GGG
  source 1..20: mol_type = other DNA
actgggcaccatggagcatg

SEQ ID NO: 9392 - DNA, 20 bp, synthetic construct
  misc_feature 1..20: note = Description of Artificial Sequence: Synthetic oligonucleotide
  misc_feature 1..20: note = Target: ANGPTL4; (-) strand; PAM type: NRG; PAM sequence: GGG
  source 1..20: mol_type = other DNA
gactgggcaccatggagcat

SEQ ID NO: 9393 - DNA, 20 bp, synthetic construct
  misc_feature 1..20: note = Description of Artificial Sequence: Synthetic oligonucleotide
  misc_feature 1..20: note = Target: ANGPTL4; (-) strand; PAM type: NRG; PAM sequence: TGG
  source 1..20: mol_type = other DNA
ggactgggcaccatggagca

SEQ ID NO: 9394 - DNA, 20 bp, synthetic construct
  misc_feature 1..20: note = Description of Artificial Sequence: Synthetic oligonucleotide
  misc_feature 1..20: note = Target: ANGPTL4; (-) strand; PAM type: NRG; PAM sequence: GAG
  source 1..20: mol_type = other DNA
ggatgggactgggcaccatg

SEQ ID NO: 9395 - DNA, 20 bp, synthetic construct
  misc_feature 1..20: note = Description of Artificial Sequence: Synthetic oligonucleotide
  misc_feature 1..20: note = Target: ANGPTL4; (-) strand; PAM type: NRG; PAM sequence: TGG
  source 1..20: mol_type = other DNA
gtggatgggactgggcacca

SEQ ID NO: 9396 - DNA, 20 bp, synthetic construct
  misc_feature 1..20: note = Description of Artificial Sequence: Synthetic oligonucleotide
  misc_feature 1..20: note = Target: ANGPTL4; (-) strand; PAM type: NRG; PAM sequence: GGG
  source 1..20: mol_type = other DNA
cttgggtggtggatgggact

SEQ ID NO: 9397 - DNA, 20 bp, synthetic construct
  misc_feature 1..20: note = Description of Artificial Sequence: Synthetic oligonucleotide
  misc_feature 1..20: note = Target: ANGPTL4; (-) strand; PAM type: NRG; PAM sequence: TGG
  source 1..20: mol_type = other DNA
ccttgggtggtggatgggac

SEQ ID NO: 9398 - DNA, 20 bp, synthetic construct
  misc_feature 1..20: note = Description of Artificial Sequence: Synthetic oligonucleotide
  misc_feature 1..20: note = Target: ANGPTL4; (-) strand; PAM type: NRG; PAM sequence: GGG
  source 1..20: mol_type = other DNA
tcagcccttgggtggtggat

SEQ ID NO: 9399 - DNA, 20 bp, synthetic construct
  misc_feature 1..20: note = Description of Artificial Sequence: Synthetic oligonucleotide
  misc_feature 1..20: note = Target: ANGPTL4; (-) strand; PAM type: NRG; PAM sequence: TGG
  source 1..20: mol_type = other DNA
ctcagcccttgggtggtgga

SEQ ID NO: 9400 - DNA, 20 bp, synthetic construct
  misc_feature 1..20: note = Description of Artificial Sequence: Synthetic oligonucleotide
  misc_feature 1..20: note = Target: ANGPTL4; (-) strand; PAM type: NRG; PAM sequence: TGG
  source 1..20: mol_type = other DNA
actcctcagcccttgggtgg

SEQ ID NO: 9401 - DNA, 20 bp, synthetic construct
  misc_feature 1..20: note = Description of Artificial Sequence: Synthetic oligonucleotide
  misc_feature 1..20: note = Target: ANGPTL4; (-) strand; PAM type: NRG; PAM sequence: TGG
  source 1..20: mol_type = other DNA
tgcactcctcagcccttggg

SEQ ID NO: 9402 - DNA, 20 bp, synthetic construct
  misc_feature 1..20: note = Description of Artificial Sequence: Synthetic oligonucleotide
  misc_feature 1..20: note = Target: ANGPTL4; (-) strand; PAM type: NRG; PAM sequence: GGG
  source 1..20: mol_type = other DNA
gcctgcactcctcagccctt

SEQ ID NO: 9403 - DNA, 20 bp, synthetic construct
  misc_feature 1..20: note = Description of Artificial Sequence: Synthetic oligonucleotide
  misc_feature 1..20: note = Target: ANGPTL4; (-) strand; PAM type: NRG; PAM sequence: TGG
  source 1..20: mol_type = other DNA
cgcctgcactcctcagccct

SEQ ID NO: 9404 - DNA, 20 bp, synthetic construct
  misc_feature 1..20: note = Description of Artificial Sequence: Synthetic oligonucleotide
  misc_feature 1..20: note = Target: ANGPTL4; (-) strand; PAM type: NRG; PAM sequence: CAG
  source 1..20: mol_type = other DNA
cgccgtgcgcctgcactcct

SEQ ID NO: 9405 - DNA, 20 bp, synthetic construct
  misc_feature 1..20: note = Description of Artificial Sequence: Synthetic oligonucleotide
  misc_feature 1..20: note = Target: ANGPTL4; (-) strand; PAM type: NRG; PAM sequence: CAG
  source 1..20: mol_type = other DNA
ctgcaggtggagctgcctgc

SEQ ID NO: 9406 - DNA, 20 bp, synthetic construct
  misc_feature 1..20: note = Description of Artificial Sequence: Synthetic oligonucleotide
  misc_feature 1..20: note = Target: ANGPTL4; (-) strand; PAM type: NRG; PAM sequence: GAG
  source 1..20: mol_type = other DNA
ctgcaccggggctgcaggtg

SEQ ID NO: 9407 - DNA, 20 bp, synthetic construct
  misc_feature 1..20: note = Description of Artificial Sequence: Synthetic oligonucleotide
  misc_feature 1..20: note = Target: ANGPTL4; (-) strand; PAM type: NRG; PAM sequence: TGG
  source 1..20: mol_type = other DNA
tcctgcaccggggctgcagg

SEQ ID NO: 9408 - DNA, 20 bp, synthetic construct
  misc_feature 1..20: note = Description of Artificial Sequence: Synthetic oligonucleotide
  misc_feature 1..20: note = Target: ANGPTL4; (-) strand; PAM type: NRG; PAM sequence: AGG
  source 1..20: mol_type = other DNA
ggatcctgcaccggggctgc

SEQ ID NO: 9409 - DNA, 20 bp, synthetic construct
  misc_feature 1..20: note = Description of Artificial Sequence: Synthetic oligonucleotide
  misc_feature 1..20: note = Target: ANGPTL4; (-) strand; PAM type: NRG; PAM sequence: CAG
  source 1..20: mol_type = other DNA
tggatcctgcaccggggctg

SEQ ID NO: 9410 - DNA, 20 bp, synthetic construct
  misc_feature 1..20: note = Description of Artificial Sequence: Synthetic oligonucleotide
  misc_feature 1..20: note = Target: ANGPTL4; (-) strand; PAM type: NRG; PAM sequence: GGG
  source 1..20: mol_type = other DNA
acccagtggatcctgcaccg

SEQ ID NO: 9411 - DNA, 20 bp, synthetic construct
  misc_feature 1..20: note = Description of Artificial Sequence: Synthetic oligonucleotide
  misc_feature 1..20: note = Target: ANGPTL4; (-) strand; PAM type: NRG; PAM sequence: GGG
  source 1..20: mol_type = other DNA
cacccagtggatcctgcacc

SEQ ID NO: 9412 - DNA, 20 bp, synthetic construct
  misc_feature 1..20: note = Description of Artificial Sequence: Synthetic oligonucleotide
  misc_feature 1..20: note = Target: ANGPTL4; (-) strand; PAM type: NRG; PAM sequence: CGG
  source 1..20: mol_type = other DNA
tcacccagtggatcctgcac

SEQ ID NO: 9413 - DNA, 20 bp, synthetic construct
  misc_feature 1..20: note = Description of Artificial Sequence: Synthetic oligonucleotide
  misc_feature 1..20: note = Target: ANGPTL4; (-) strand; PAM type: NRG; PAM sequence: TGG
  source 1..20: mol_type = other DNA
gcccagctagcttcacccag

SEQ ID NO: 9414 - DNA, 20 bp, synthetic construct
  misc_feature 1..20: note = Description of Artificial Sequence: Synthetic oligonucleotide
  misc_feature 1..20: note = Target: ANGPTL4; (-) strand; PAM type: NRG; PAM sequence: CAG
  source 1..20: mol_type = other DNA
ggagcccagctagcttcacc

SEQ ID NO: 9415 - DNA, 20 bp, synthetic construct
  misc_feature 1..20: note = Description of Artificial Sequence: Synthetic oligonucleotide
  misc_feature 1..20: note = Target: ANGPTL4; (-) strand; PAM type: NRG; PAM sequence: TAG
  source 1..20: mol_type = other DNA
accagactcaggagcccagc

SEQ ID NO: 9416 - DNA, 20 bp, synthetic construct
  misc_feature 1..20: note = Description of Artificial Sequence: Synthetic oligonucleotide
  misc_feature 1..20: note = Target: ANGPTL4; (-) strand; PAM type: NRG; PAM sequence: CAG
  source 1..20: mol_type = other DNA
ccccaccagactcaggagcc

SEQ ID NO: 9417 - DNA, 20 bp, synthetic construct
  misc_feature 1..20: note = Description of Artificial Sequence: Synthetic oligonucleotide
  misc_feature 1..20: note = Target: ANGPTL4; (-) strand; PAM type: NRG; PAM sequence: GAG
  source 1..20: mol_type = other DNA
cacgtccccaccagactcag

SEQ ID NO: 9418 - DNA, 20 bp, synthetic construct
  misc_feature 1..20: note = Description of Artificial Sequence: Synthetic oligonucleotide
  misc_feature 1..20: note = Target: ANGPTL4; (-) strand; PAM type: NRG; PAM sequence: AGG
  source 1..20: mol_type = other DNA
tccacgtccccaccagactc

SEQ ID NO: 9419 - DNA, 20 bp, synthetic construct
  misc_feature 1..20: note = Description of Artificial Sequence: Synthetic oligonucleotide
  misc_feature 1..20: note = Target: ANGPTL4; (-) strand; PAM type: NRG; PAM sequence: CAG
  source 1..20: mol_type = other DNA
ctccacgtccccaccagact

SEQ ID NO: 9420 - DNA, 20 bp, synthetic construct
  misc_feature 1..20: note = Description of Artificial Sequence: Synthetic oligonucleotide
  misc_feature 1..20: note = Target: ANGPTL4; (-) strand; PAM type: NRG; PAM sequence: CAG
  source 1..20: mol_type = other DNA
aaggttctccacgtccccac

SEQ ID NO: 9421 - DNA, 20 bp, synthetic construct
  misc_feature 1..20: note = Description of Artificial Sequence: Synthetic oligonucleotide
  misc_feature 1..20: note = Target: ANGPTL4; (-) strand; PAM type: NRG; PAM sequence: AGG
  source 1..20: mol_type = other DNA
acaatccctgagctagacaa

SEQ ID NO: 9422 - DNA, 20 bp, synthetic construct
  misc_feature 1..20: note = Description of Artificial Sequence: Synthetic oligonucleotide
  misc_feature 1..20: note = Target: ANGPTL4; (-) strand; PAM type: NRG; PAM sequence: AAG
  source 1..20: mol_type = other DNA
tacaatccctgagctagaca

SEQ ID NO: 9423 - DNA, 20 bp, synthetic construct
  misc_feature 1..20: note = Description of Artificial Sequence: Synthetic oligonucleotide
  misc_feature 1..20: note = Target: ANGPTL4; (-) strand; PAM type: NRG; PAM sequence: TAG
  source 1..20: mol_type = other DNA
tgtatttacaatccctgagc

SEQ ID NO: 9424 - DNA, 20 bp, synthetic construct
  misc_feature 1..20: note = Description of Artificial Sequence: Synthetic oligonucleotide
  misc_feature 1..20: note = Target: ANGPTL4; (-) strand; PAM type: NRG; PAM sequence: GAG
  source 1..20: mol_type = other DNA
ttggtgtatttacaatccct

SEQ ID NO: 9425 - DNA, 20 bp, synthetic construct
  misc_feature 1..20: note = Description of Artificial Sequence: Synthetic oligonucleotide
  misc_feature 1..20: note = Target: ANGPTL4; (-) strand; PAM type: NRG; PAM sequence: TGG
  source 1..20: mol_type = other DNA
gctagacatagggtgatgat

SEQ ID NO: 9426 - DNA, 20 bp, synthetic construct
  misc_feature 1..20: note = Description of Artificial Sequence: Synthetic oligonucleotide
  misc_feature 1..20: note = Target: ANGPTL4; (-) strand; PAM type: NRG; PAM sequence: GGG
  source 1..20: mol_type = other DNA
caaaccctgagctagacata

SEQ ID NO: 9427 - DNA, 20 bp, synthetic construct
  misc_feature 1..20: note = Description of Artificial Sequence: Synthetic oligonucleotide
  misc_feature 1..20: note = Target: ANGPTL4; (-) strand; PAM type: NRG; PAM sequence: AGG
  source 1..20: mol_type = other DNA
acaaaccctgagctagacat

SEQ ID NO: 9428 - DNA, 20 bp, synthetic construct
  misc_feature 1..20: note = Description of Artificial Sequence: Synthetic oligonucleotide
  misc_feature 1..20: note = Target: ANGPTL4; (-) strand; PAM type: NRG; PAM sequence: TAG
  source 1..20: mol_type = other DNA
cacaaaccctgagctagaca

SEQ ID NO: 9429 - DNA, 20 bp, synthetic construct
  misc_feature 1..20: note = Description of Artificial Sequence: Synthetic oligonucleotide
  misc_feature 1..20: note = Target: ANGPTL4; (-) strand; PAM type: NRG; PAM sequence: TAG
  source 1..20: mol_type = other DNA
tgcattcacaaaccctgagc

SEQ ID NO: 9430 - DNA, 20 bp, synthetic construct
  misc_feature 1..20: note = Description of Artificial Sequence: Synthetic oligonucleotide
  misc_feature 1..20: note = Target: ANGPTL4; (-) strand; PAM type: NRG; PAM sequence: GAG
  source 1..20: mol_type = other DNA
ttggtgcattcacaaaccct

SEQ ID NO: 9431 - DNA, 20 bp, synthetic construct
  misc_feature 1..20: note = Description of Artificial Sequence: Synthetic oligonucleotide
  misc_feature 1..20: note = Target: ANGPTL4; (-) strand; PAM type: NRG; PAM sequence: TGG
  source 1..20: mol_type = other DNA
gctagatacagagtgttcat

SEQ ID NO: 9432 - DNA, 20 bp, synthetic construct
  misc_feature 1..20: note = Description of Artificial Sequence: Synthetic oligonucleotide
  misc_feature 1..20: note = Target: ANGPTL4; (-) strand; PAM type: NRG; PAM sequence: GAG
  source 1..20: mol_type = other DNA
caccagagtagctagataca

SEQ ID NO: 9433 - DNA, 20 bp, synthetic construct
  misc_feature 1..20: note = Description of Artificial Sequence: Synthetic oligonucleotide
  misc_feature 1..20: note = Target: ANGPTL4; (-) strand; PAM type: NRG; PAM sequence: CAG
  source 1..20: mol_type = other DNA
cccaccagagtagctagata

SEQ ID NO: 9434 - DNA, 20 bp, synthetic construct
  misc_feature 1..20: note = Description of Artificial Sequence: Synthetic oligonucleotide
  misc_feature 1..20: note = Target: ANGPTL4; (-) strand; PAM type: NRG; PAM sequence: TAG
  source 1..20: mol_type = other DNA
caaggccccaccagagtagc

SEQ ID NO: 9435 - DNA, 20 bp, synthetic construct
  misc_feature 1..20: note = Description of Artificial Sequence: Synthetic oligonucleotide
  misc_feature 1..20: note = Target: ANGPTL4; (-) strand; PAM type: NRG; PAM sequence: TAG
  source 1..20: mol_type = other DNA
tctccaaggccccaccagag

SEQ ID NO: 9436 - DNA, 20 bp, synthetic construct
  misc_feature 1..20: note = Description of Artificial Sequence: Synthetic oligonucleotide
  misc_feature 1..20: note = Target: ANGPTL4; (-) strand; PAM type: NRG; PAM sequence: GAG
  source 1..20: mol_type = other DNA
ggttctccaaggccccacca

SEQ ID NO: 9437 - DNA, 20 bp, synthetic construct
  misc_feature 1..20: note = Description of Artificial Sequence: Synthetic oligonucleotide
  misc_feature 1..20: note = Target: ANGPTL4; (-) strand; PAM type: NRG; PAM sequence: CAG
  source 1..20: mol_type = other DNA
aaggttctccaaggccccac

SEQ ID NO: 9438 - DNA, 20 bp, synthetic construct
  misc_feature 1..20: note = Description of Artificial Sequence: Synthetic oligonucleotide
  misc_feature 1..20: note = Target: ANGPTL4; (-) strand; PAM type: NRG; PAM sequence: AGG
  source 1..20: mol_type = other DNA
ctagacataaaggttctcca

SEQ ID NO: 9439 - DNA, 20 bp, synthetic construct
  misc_feature 1..20: note = Description of Artificial Sequence: Synthetic oligonucleotide
  misc_feature 1..20: note = Target: ANGPTL4; (-) strand; PAM type: NRG; PAM sequence: AAG
  source 1..20: mol_type = other DNA
gctagacataaaggttctcc

SEQ ID NO: 9440 - DNA, 20 bp, synthetic construct
  misc_feature 1..20: note = Description of Artificial Sequence: Synthetic oligonucleotide
  misc_feature 1..20: note = Target: ANGPTL4; (-) strand; PAM type: NRG; PAM sequence: AGG
  source 1..20: mol_type = other DNA
aatccctgagctagacataa

SEQ ID NO: 9441 - DNA, 20 bp, synthetic construct
  misc_feature 1..20: note = Description of Artificial Sequence: Synthetic oligonucleotide
  misc_feature 1..20: note = Target: ANGPTL4; (-) strand; PAM type: NRG; PAM sequence: AAG
  source 1..20: mol_type = other DNA
caatccctgagctagacata

SEQ ID NO: 9442 - DNA, 20 bp, synthetic construct
  misc_feature 1..20: note = Description of Artificial Sequence: Synthetic oligonucleotide
  misc_feature 1..20: note = Target: ANGPTL4; (-) strand; PAM type: NRG; PAM sequence: TAG
  source 1..20: mol_type = other DNA
tgtatttacaatccctgagc

SEQ ID NO: 9443 - DNA, 20 bp, synthetic construct
  misc_feature 1..20: note = Description of Artificial Sequence: Synthetic oligonucleotide
  misc_feature 1..20: note = Target: ANGPTL4; (-) strand; PAM type: NRG; PAM sequence: GAG
  source 1..20: mol_type = other DNA
ttggtgtatttacaatccct

SEQ ID NO: 9444 - DNA, 20 bp, synthetic construct
  misc_feature 1..20: note = Description of Artificial Sequence: Synthetic oligonucleotide
  misc_feature 1..20: note = Target: ANGPTL4; (-) strand; PAM type: NRG; PAM sequence: TGG
  source 1..20: mol_type = other DNA
gctagatacagagtgccgat

SEQ ID NO: 9445 - DNA, 20 bp, synthetic construct
  misc_feature 1..20: note = Description of Artificial Sequence: Synthetic oligonucleotide
  misc_feature 1..20: note = Target: ANGPTL4; (-) strand; PAM type: NRG; PAM sequence: GAG
  source 1..20: mol_type = other DNA
caaaccttgagctagataca

SEQ ID NO: 9446 - DNA, 20 bp, synthetic construct
  misc_feature 1..20: note = Description of Artificial Sequence: Synthetic oligonucleotide
  misc_feature 1..20: note = Target: ANGPTL4; (-) strand; PAM type: NRG; PAM sequence: CAG
  source 1..20: mol_type = other DNA
tacaaaccttgagctagata

SEQ ID NO: 9447 - DNA, 20 bp, synthetic construct
  misc_feature 1..20: note = Description of Artificial Sequence: Synthetic oligonucleotide
  misc_feature 1..20: note = Target: ANGPTL4; (-) strand; PAM type: NRG; PAM sequence: TAG
  source 1..20: mol_type = other DNA
tgtgtttacaaaccttgagc

SEQ ID NO: 9448 - DNA, 20 bp, synthetic construct
  misc_feature 1..20: note = Description of Artificial Sequence: Synthetic oligonucleotide
  misc_feature 1..20: note = Target: ANGPTL4; (-) strand; PAM type: NRG; PAM sequence: GAG
  source 1..20: mol_type = other DNA
ttggtgtgtttacaaacctt

SEQ ID NO: 9449 - DNA, 20 bp, synthetic construct
  misc_feature 1..20: note = Description of Artificial Sequence: Synthetic oligonucleotide
  misc_feature 1..20: note = Target: ANGPTL4; (-) strand; PAM type: NRG; PAM sequence: TGG
  source 1..20: mol_type = other DNA
gctagacacagggtgctgat

SEQ ID NO: 9450 - DNA, 20 bp, synthetic construct
  misc_feature 1..20: note = Description of Artificial Sequence: Synthetic oligonucleotide
  misc_feature 1..20: note = Target: ANGPTL4; (-) strand; PAM type: NRG; PAM sequence: GGG
  source 1..20: mol_type = other DNA
caaaccctgagctagacaca

SEQ ID NO: 9451 - DNA, 20 bp, synthetic construct
  misc_feature 1..20: note = Description of Artificial Sequence: Synthetic oligonucleotide
  misc_feature 1..20: note = Target: ANGPTL4; (-) strand; PAM type: NRG; PAM sequence: AGG
  source 1..20: mol_type = other DNA
acaaaccctgagctagacac

SEQ ID NO: 9452 - DNA, 20 bp, synthetic construct
  misc_feature 1..20: note = Description of Artificial Sequence: Synthetic oligonucleotide
  misc_feature 1..20: note = Target: ANGPTL4; (-) strand; PAM type: NRG; PAM sequence: CAG
  source 1..20: mol_type = other DNA
cacaaaccctgagctagaca

SEQ ID NO: 9453 - DNA, 20 bp, synthetic construct
  misc_feature 1..20: note = Description of Artificial Sequence: Synthetic oligonucleotide
  misc_feature 1..20: note = Target: ANGPTL4; (-) strand; PAM type: NRG; PAM sequence: TAG
  source 1..20: mol_type = other DNA
tgcattcacaaaccctgagc

SEQ ID NO: 9454 - DNA, 20 bp, synthetic construct
  misc_feature 1..20: note = Description of Artificial Sequence: Synthetic oligonucleotide
  misc_feature 1..20: note = Target: ANGPTL4; (-) strand; PAM type: NRG; PAM sequence: GAG
  source 1..20: mol_type = other DNA
ttggtgcattcacaaaccct

SEQ ID NO: 9455 - DNA, 20 bp, synthetic construct
  misc_feature 1..20: note = Description of Artificial Sequence: Synthetic oligonucleotide
  misc_feature 1..20: note = Target: ANGPTL4; (-) strand; PAM type: NRG; PAM sequence: TGG
  source 1..20: mol_type = other DNA
gctagatacagagtgtcgat

SEQ ID NO: 9456 - DNA, 20 bp, synthetic construct
  misc_feature 1..20: note = Description of Artificial Sequence: Synthetic oligonucleotide
  misc_feature 1..20: note = Target: ANGPTL4; (-) strand; PAM type: NRG; PAM sequence: GAG
  source 1..20: mol_type = other DNA
caccacagtagctagataca

SEQ ID NO: 9457 - DNA, 20 bp, synthetic construct
  misc_feature 1..20: note = Description of Artificial Sequence: Synthetic oligonucleotide
  misc_feature 1..20: note = Target: ANGPTL4; (-) strand; PAM type: NRG; PAM sequence: CAG
  source 1..20: mol_type = other DNA
cccaccacagtagctagata

SEQ ID NO: 9458 - DNA, 20 bp, synthetic construct
  misc_feature 1..20: note = Description of Artificial Sequence: Synthetic oligonucleotide
  misc_feature 1..20: note = Target: ANGPTL4; (-) strand; PAM type: NRG; PAM sequence: TAG
  source 1..20: mol_type = other DNA
caaggccccaccacagtagc

SEQ ID NO: 9459 - DNA, 20 bp, synthetic construct
  misc_feature 1..20: note = Description of Artificial Sequence: Synthetic oligonucleotide
  misc_feature 1..20: note = Target: ANGPTL4; (-) strand; PAM type: NRG; PAM sequence: TAG
  source 1..20: mol_type = other DNA
tctccaaggccccaccacag

SEQ ID NO: 9460 - DNA, 20 bp, synthetic construct
  misc_feature 1..20: note = Description of Artificial Sequence: Synthetic oligonucleotide
  misc_feature 1..20: note = Target: ANGPTL4; (-) strand; PAM type: NRG; PAM sequence: CAG
  source 1..20: mol_type = other DNA
ggttctccaaggccccacca

SEQ ID NO: 9461 - DNA, 20 bp, synthetic construct
  misc_feature 1..20: note = Description of Artificial Sequence: Synthetic oligonucleotide
  misc_feature 1..20: note = Target: ANGPTL4; (-) strand; PAM type: NRG; PAM sequence: AGG
  source 1..20: mol_type = other DNA
gtcaacacaaaggttctcca

SEQ ID NO: 9462 - DNA, 20 bp, synthetic construct
  misc_feature 1..20: note = Description of Artificial Sequence: Synthetic oligonucleotide
  misc_feature 1..20: note = Target: ANGPTL4; (-) strand; PAM type: NRG; PAM sequence: AAG
  source 1..20: mol_type = other DNA
tgtcaacacaaaggttctcc

SEQ ID NO: 9463 - DNA, 20 bp, synthetic construct
  misc_feature 1..20: note = Description of Artificial Sequence: Synthetic oligonucleotide
  misc_feature 1..20: note = Target: ANGPTL4; (-) strand; PAM type: NRG; PAM sequence: AGG
  source 1..20: mol_type = other DNA
gatacagagtgtcaacacaa

SEQ ID NO: 9464 - DNA, 20 bp, synthetic construct
  misc_feature 1..20: note = Description of Artificial Sequence: Synthetic oligonucleotide
  misc_feature 1..20: note = Target: ANGPTL4; (-) strand; PAM type: NRG; PAM sequence: AAG
  source 1..20: mol_type = other DNA
agatacagagtgtcaacaca

SEQ ID NO: 9465 - DNA, 20 bp, synthetic construct
  misc_feature 1..20: note = Description of Artificial Sequence: Synthetic oligonucleotide
  misc_feature 1..20: note = Target: ANGPTL4; (-) strand; PAM type: NRG; PAM sequence: GAG
  source 1..20: mol_type = other DNA
caccagattaactagataca

SEQ ID NO: 9466 - DNA, 20 bp, synthetic construct
  misc_feature 1..20: note = Description of Artificial Sequence: Synthetic oligonucleotide
  misc_feature 1..20: note = Target: ANGPTL4; (-) strand; PAM type: NRG; PAM sequence: CAG
  source 1..20: mol_type = other DNA
cccaccagattaactagata

SEQ ID NO: 9467 - DNA, 20 bp, synthetic construct
  misc_feature 1..20: note = Description of Artificial Sequence: Synthetic oligonucleotide
  misc_feature 1..20: note = Target: ANGPTL4; (-) strand; PAM type: NRG; PAM sequence: TAG
  source 1..20: mol_type = other DNA
cacatccccaccagattaac

SEQ ID NO: 9468 - DNA, 20 bp, synthetic construct
  misc_feature 1..20: note = Description of Artificial Sequence: Synthetic oligonucleotide
  misc_feature 1..20: note = Target: ANGPTL4; (-) strand; PAM type: NRG; PAM sequence: CAG
  source 1..20: mol_type = other DNA
aaggttctccacatccccac

SEQ ID NO: 9469 - DNA, 20 bp, synthetic construct
  misc_feature 1..20: note = Description of Artificial Sequence: Synthetic oligonucleotide
  misc_feature 1..20: note = Target: ANGPTL4; (-) strand; PAM type: NRG; PAM sequence: AGG
  source 1..20: mol_type = other DNA
aattcctgagctagacacaa

SEQ ID NO: 9470 - DNA, 20 bp, synthetic construct
  misc_feature 1..20: note = Description of Artificial Sequence: Synthetic oligonucleotide
  misc_feature 1..20: note = Target: ANGPTL4; (-) strand; PAM type: NRG; PAM sequence: AAG
  source 1..20: mol_type = other DNA
caattcctgagctagacaca

SEQ ID NO: 9471 - DNA, 20 bp, synthetic construct
  misc_feature 1..20: note = Description of Artificial Sequence: Synthetic oligonucleotide
  misc_feature 1..20: note = Target: ANGPTL4; (-) strand; PAM type: NRG; PAM sequence: TAG
  source 1..20: mol_type = other DNA
tgcgtttacaattcctgagc

SEQ ID NO: 9472 - DNA, 20 bp, synthetic construct
  misc_feature 1..20: note = Description of Artificial Sequence: Synthetic oligonucleotide
  misc_feature 1..20: note = Target: ANGPTL4; (-) strand; PAM type: NRG; PAM sequence: GAG
  source 1..20: mol_type = other DNA
ttggtgcgtttacaattcct

SEQ ID NO: 9473 - DNA, 20 bp, synthetic construct
  misc_feature 1..20: note = Description of Artificial Sequence: Synthetic oligonucleotide
  misc_feature 1..20: note = Target: ANGPTL4; (-) strand; PAM type: NRG; PAM sequence: TGG
  source 1..20: mol_type = other DNA
tgttttgacagggcgctgat

SEQ ID NO: 9474 - DNA, 20 bp, synthetic construct
  misc_feature 1..20: note = Description of Artificial Sequence: Synthetic oligonucleotide
  misc_feature 1..20: note = Target: ANGPTL4; (-) strand; PAM type: NRG; PAM sequence: GGG
  source 1..20: mol_type = other DNA
cccactggtctgttttgaca

SEQ ID NO: 9475 - DNA, 20 bp, synthetic construct
  misc_feature 1..20: note = Description of Artificial Sequence: Synthetic oligonucleotide
  misc_feature 1..20: note = Target: ANGPTL4; (-) strand; PAM type: NRG; PAM sequence: AGG
  source 1..20: mol_type = other DNA
gcccactggtctgttttgac

SEQ ID NO: 9476 - DNA, 20 bp, synthetic construct
  misc_feature 1..20: note = Description of Artificial Sequence: Synthetic oligonucleotide
  misc_feature 1..20: note = Target: ANGPTL4; (-) strand; PAM type: NRG; PAM sequence: CAG
  source 1..20: mol_type = other DNA
agcccactggtctgttttga

SEQ ID NO: 9477 - DNA, 20 bp, synthetic construct
  misc_feature 1..20: note = Description of Artificial Sequence: Synthetic oligonucleotide
  misc_feature 1..20: note = Target: ANGPTL4; (-) strand; PAM type: NRG; PAM sequence: TGG
  source 1..20: mol_type = other DNA
tgctgattggtagagcccac

SEQ ID NO: 9478 - DNA, 20 bp, synthetic construct
  misc_feature 1..20: note = Description of Artificial Sequence: Synthetic oligonucleotide
  misc_feature 1..20: note = Target: ANGPTL4; (-) strand; PAM type: NRG; PAM sequence: GAG
  source 1..20: mol_type = other DNA
ccacatcctgctgattggta

SEQ ID NO: 9479 - DNA, 20 bp, synthetic construct
  misc_feature 1..20: note = Description of Artificial Sequence: Synthetic oligonucleotide
  misc_feature 1..20: note = Target: ANGPTL4; (-) strand; PAM type: NRG; PAM sequence: TAG
  source 1..20: mol_type = other DNA
acccacatcctgctgattgg

SEQ ID NO: 9480 - DNA, 20 bp, synthetic construct
  misc_feature 1..20: note = Description of Artificial Sequence: Synthetic oligonucleotide
  misc_feature 1..20: note = Target: ANGPTL4; (-) strand; PAM type: NRG; PAM sequence: TGG
  source 1..20: mol_type = other DNA
cccacccacatcctgctgat

SEQ ID NO: 9481 - DNA, 20 bp, synthetic construct
  misc_feature 1..20: note = Description of Artificial Sequence: Synthetic oligonucleotide
  misc_feature 1..20: note = Target: ANGPTL4; (-) strand; PAM type: NRG; PAM sequence: TGG
  source 1..20: mol_type = other DNA
cctgcttttattctcttatc

SEQ ID NO: 9482 - DNA, 20 bp, synthetic construct
  misc_feature 1..20: note = Description of Artificial Sequence: Synthetic oligonucleotide
  misc_feature 1..20: note = Target: ANGPTL4; (-) strand; PAM type: NRG; PAM sequence: CAG
  source 1..20: mol_type = other DNA
gttgccactgctggctcggg

SEQ ID NO: 9483 - DNA, 20 bp, synthetic construct
  misc_feature 1..20: note = Description of Artificial Sequence: Synthetic oligonucleotide
  misc_feature 1..20: note = Target: ANGPTL4; (-) strand; PAM type: NRG; PAM sequence: GGG
  source 1..20: mol_type = other DNA
tgggttgccactgctggctc

SEQ ID NO: 9484 - DNA, 20 bp, synthetic construct
  misc_feature 1..20: note = Description of Artificial Sequence: Synthetic oligonucleotide
  misc_feature 1..20: note = Target: ANGPTL4; (-) strand; PAM type: NRG; PAM sequence: CGG
  source 1..20: mol_type = other DNA
gtgggttgccactgctggct

SEQ ID NO: 9485 - DNA, 20 bp, synthetic construct
  misc_feature 1..20: note = Description of Artificial Sequence: Synthetic oligonucleotide
  misc_feature 1..20: note = Target: ANGPTL4; (-) strand; PAM type: NRG; PAM sequence: TGG
  source 1..20: mol_type = other DNA
cccaagtgggttgccactgc

SEQ ID NO: 9486 - DNA, 20 bp, synthetic construct
  misc_feature 1..20: note = Description of Artificial Sequence: Synthetic oligonucleotide
  misc_feature 1..20: note = Target: ANGPTL4; (-) strand; PAM type: NRG; PAM sequence: GGG
  source 1..20: mol_type = other DNA
gtgtggaaggggacccaagt

SEQ ID NO: 9487 - DNA, 20 bp, synthetic construct
  misc_feature 1..20: note = Description of Artificial Sequence: Synthetic oligonucleotide
  misc_feature 1..20: note = Target: ANGPTL4; (-) strand; PAM type: NRG; PAM sequence: TGG
  source 1..20: mol_type = other DNA
agtgtggaaggggacccaag

SEQ ID NO: 9488 - DNA, 20 bp, synthetic construct
  misc_feature 1..20: note = Description of Artificial Sequence: Synthetic oligonucleotide
  misc_feature 1..20: note = Target: ANGPTL4; (-) strand; PAM type: NRG; PAM sequence: AAG
  source 1..20: mol_type = other DNA
cacagtgtggaaggggaccc

SEQ ID NO: 9489 - DNA, 20 bp, synthetic construct
  misc_feature 1..20: note = Description of Artificial Sequence: Synthetic oligonucleotide
  misc_feature 1..20: note = Target: ANGPTL4; (-) strand; PAM type: NRG; PAM sequence: GGG
  source 1..20: mol_type = other DNA
aagcttccacagtgtggaag

SEQ ID NO: 9490 - DNA, 20 bp, synthetic construct
  misc_feature 1..20: note = Description of Artificial Sequence: Synthetic oligonucleotide
  misc_feature 1..20: note = Target: ANGPTL4; (-) strand; PAM type: NRG; PAM sequence: GGG
  source 1..20: mol_type = other DNA
aaagcttccacagtgtggaa

SEQ ID NO: 9491 - DNA, 20 bp, synthetic construct
  misc_feature 1..20: note = Description of Artificial Sequence: Synthetic oligonucleotide
  misc_feature 1..20: note = Target: ANGPTL4; (-) strand; PAM type: NRG; PAM sequence: AGG
  source 1..20: mol_type = other DNA
caaagcttccacagtgtgga

SEQ ID NO: 9492 - DNA, 20 bp, synthetic construct
  misc_feature 1..20: note = Description of Artificial Sequence: Synthetic oligonucleotide
  misc_feature 1..20: note = Target: ANGPTL4; (-) strand; PAM type: NRG; PAM sequence: AAG
  source 1..20: mol_type = other DNA
acaaagcttccacagtgtgg

SEQ ID NO: 9493 - DNA, 20 bp, synthetic construct
  misc_feature 1..20: note = Description of Artificial Sequence: Synthetic oligonucleotide
  misc_feature 1..20: note = Target: ANGPTL4; (-) strand; PAM type: NRG; PAM sequence: TGG
  source 1..20: mol_type = other DNA
agaacaaagcttccacagtg

SEQ ID NO: 9494 - DNA, 20 bp, synthetic construct
  misc_feature 1..20: note = Description of Artificial Sequence: Synthetic oligonucleotide
  misc_feature 1..20: note = Target: ANGPTL4; (-) strand; PAM type: NRG; PAM sequence: CAG
  source 1..20: mol_type = other DNA
gcaaaagaacaaagcttcca

SEQ ID NO: 9495 - DNA, 20 bp, synthetic construct
  misc_feature 1..20: note = Description of Artificial Sequence: Synthetic oligonucleotide
  misc_feature 1..20: note = Target: ANGPTL4; (-) strand; PAM type: NRG; PAM sequence: AAG
  source 1..20: mol_type = other DNA
ttgcaaagagcaaaagaaca

SEQ ID NO: 9496 - DNA, 20 bp, synthetic construct
  misc_feature 1..20: note = Description of Artificial Sequence: Synthetic oligonucleotide
  misc_feature 1..20: note = Target: ANGPTL4; (-) strand; PAM type: NRG; PAM sequence: AAG
  source 1..20: mol_type = other DNA
agatttattgcaaagagcaa

SEQ ID NO: 9497 - DNA, 20 bp, synthetic construct
  misc_feature 1..20: note = Description of Artificial Sequence: Synthetic oligonucleotide
  misc_feature 1..20: note = Target: ANGPTL4; (-) strand; PAM type: NRG; PAM sequence: GAG
  source 1..20: mol_type = other DNA
agtacaagatttattgcaaa

SEQ ID NO: 9498 - DNA, 20 bp, synthetic construct
  misc_feature 1..20: note = Description of Artificial Sequence: Synthetic oligonucleotide
  misc_feature 1..20: note = Target: ANGPTL4; (-) strand; PAM type: NRG; PAM sequence: AAG
  source 1..20: mol_type = other DNA
gcagtacaagatttattgca

SEQ ID NO: 9499 - DNA, 20 bp, synthetic construct
  misc_feature 1..20: note = Description of Artificial Sequence: Synthetic oligonucleotide
  misc_feature 1..20: note = Target: ANGPTL4; (-) strand; PAM type: NRG; PAM sequence: AAG
  source 1..20: mol_type = other DNA
acccaaagagtgagcagtac

SEQ ID NO: 9500 - DNA, 20 bp, synthetic construct
  misc_feature 1..20: note = Description of Artificial Sequence: Synthetic oligonucleotide
  misc_feature 1..20: note = Target: ANGPTL4; (-) strand; PAM type: NRG; PAM sequence: CAG
  source 1..20: mol_type = other DNA
gtggggacccaaagagtgag

SEQ ID NO: 9501 - DNA, 20 bp, synthetic construct
  misc_feature 1..20: note = Description of Artificial Sequence: Synthetic oligonucleotide
  misc_feature 1..20: note = Target: ANGPTL4; (-) strand; PAM type: NRG; PAM sequence: GAG
  source 1..20: mol_type = other DNA
gcagtggggacccaaagagt

SEQ ID NO: 9502 - DNA, 20 bp, synthetic construct
  misc_feature 1..20: note = Description of Artificial Sequence: Synthetic oligonucleotide
  misc_feature 1..20: note = Target: ANGPTL4; (-) strand; PAM type: NRG; PAM sequence: GAG
  source 1..20: mol_type = other DNA
aaaagcagtggggacccaaa

SEQ ID NO: 9503 - DNA, 20 bp, synthetic construct
  misc_feature 1..20: note = Description of Artificial Sequence: Synthetic oligonucleotide
  misc_feature 1..20: note = Target: ANGPTL4; (-) strand; PAM type: NRG; PAM sequence: AAG
  source 1..20: mol_type = other DNA
ataaaagcagtggggaccca

SEQ ID NO: 9504 - DNA, 20 bp, synthetic construct
  misc_feature 1..20: note = Description of Artificial Sequence: Synthetic oligonucleotide
  misc_feature 1..20: note = Target: ANGPTL4; (-) strand; PAM type: NRG; PAM sequence: GGG
  source 1..20: mol_type = other DNA
tacagctcataaaagcagtg

SEQ ID NO: 9505 - DNA, 20 bp, synthetic construct
  misc_feature 1..20: note = Description of Artificial Sequence: Synthetic oligonucleotide
  misc_feature 1..20: note = Target: ANGPTL4; (-) strand; PAM type: NRG; PAM sequence: GGG
  source 1..20: mol_type = other DNA
ttacagctcataaaagcagt

SEQ ID NO: 9506 - DNA, 20 bp, synthetic construct
  misc_feature 1..20: note = Description of Artificial Sequence: Synthetic oligonucleotide
  misc_feature 1..20: note = Target: ANGPTL4; (-) strand; PAM type: NRG; PAM sequence: TGG
  source 1..20: mol_type = other DNA
gttacagctcataaaagcag

SEQ ID NO: 9507 - DNA, 20 bp, synthetic construct
  misc_feature 1..20: note = Description of Artificial Sequence: Synthetic oligonucleotide
  misc_feature 1..20: note = Target: ANGPTL4; (-) strand; PAM type: NRG; PAM sequence: CAG
  source 1..20: mol_type = other DNA
agtgttacagctcataaaag

SEQ ID NO: 9508 - DNA, 20 bp, synthetic construct
  misc_feature 1..20: note = Description of Artificial Sequence: Synthetic oligonucleotide
  misc_feature 1..20: note = Target: ANGPTL4; (-) strand; PAM type: NRG; PAM sequence: AAG
  source 1..20: mol_type = other DNA
gtgagtgttacagctcataa

SEQ ID NO: 9509 - DNA, 20 bp, synthetic construct
  misc_feature 1..20: note = Description of Artificial Sequence: Synthetic oligonucleotide
  misc_feature 1..20: note = Target: ANGPTL4; (-) strand; PAM type: NRG; PAM sequence: CAG
  source 1..20: mol_type = other DNA
gaccttcgcagtgagtgtta

SEQ ID NO: 9510 - DNA, 20 bp, synthetic construct
  misc_feature 1..20: note = Description of Artificial Sequence: Synthetic oligonucleotide
  misc_feature 1..20: note = Target: ANGPTL4; (-) strand; PAM type: NRG; PAM sequence: GAG
  source 1..20: mol_type = other DNA
aagctgcagaccttcgcagt

SEQ ID NO: 9511 - DNA, 20 bp, synthetic construct
  misc_feature 1..20: note = Description of Artificial Sequence: Synthetic oligonucleotide
  misc_feature 1..20: note = Target: ANGPTL4; (-) strand; PAM type: NRG; PAM sequence: CAG
  source 1..20: mol_type = other DNA
agtgaagctgcagaccttcg

SEQ ID NO: 9512 - DNA, 20 bp, synthetic construct
  misc_feature 1..20: note = Description of Artificial Sequence: Synthetic oligonucleotide
  misc_feature 1..20: note = Target: ANGPTL4; (-) strand; PAM type: NRG; PAM sequence: CAG
  source 1..20: mol_type = other DNA
ctggctcaggagtgaagctg

SEQ ID NO: 9513 - DNA, 20 bp, synthetic construct
  misc_feature 1..20: note = Description of Artificial Sequence: Synthetic oligonucleotide
  misc_feature 1..20: note = Target: ANGPTL4; (-) strand; PAM type: NRG; PAM sequence: AAG
  source 1..20: mol_type = other DNA
gtttcactggctcaggagtg

SEQ ID NO: 9514 - DNA, 20 bp, synthetic construct
  misc_feature 1..20: note = Description of Artificial Sequence: Synthetic oligonucleotide
  misc_feature 1..20: note = Target: ANGPTL4; (-) strand; PAM type: NRG; PAM sequence: GAG
  source 1..20: mol_type = other DNA
tcatggtttcactggctcag

SEQ ID NO: 9515 - DNA, 20 bp, synthetic construct
  misc_feature 1..20: note = Description of Artificial Sequence: Synthetic oligonucleotide
  misc_feature 1..20: note = Target: ANGPTL4; (-) strand; PAM type: NRG; PAM sequence: AGG
  source 1..20: mol_type = other DNA
gttcatggtttcactggctc

SEQ ID NO: 9516 - DNA, 20 bp, synthetic construct
  misc_feature 1..20: note = Description of Artificial Sequence: Synthetic oligonucleotide
  misc_feature 1..20: note = Target: ANGPTL4; (-) strand; PAM type: NRG; PAM sequence: CAG
  source 1..20: mol_type = other DNA
ggttcatggtttcactggct

SEQ ID NO: 9517 - DNA, 20 bp, synthetic construct
  misc_feature 1..20: note = Description of Artificial Sequence: Synthetic oligonucleotide
  misc_feature 1..20: note = Target: ANGPTL4; (-) strand; PAM type: NRG; PAM sequence: TGG
  source 1..20: mol_type = other DNA
tggtgggttcatggtttcac

SEQ ID NO: 9518 - DNA, 20 bp, synthetic construct
  misc_feature 1..20: note = Description of Artificial Sequence: Synthetic oligonucleotide
  misc_feature 1..20: note = Target: ANGPTL4; (-) strand; PAM type: NRG; PAM sequence: TGG
  source 1..20: mol_type = other DNA
tcttccttctggtgggttca

SEQ ID NO: 9519 - DNA, 20 bp, synthetic construct
  misc_feature 1..20: note = Description of Artificial Sequence: Synthetic oligonucleotide
  misc_feature 1..20: note = Target: ANGPTL4; (-) strand; PAM type: NRG; PAM sequence: GGG
  source 1..20: mol_type = other DNA
cagcgtttcttccttctggt

SEQ ID NO: 9520 - DNA, 20 bp, synthetic construct
  misc_feature 1..20: note = Description of Artificial Sequence: Synthetic oligonucleotide
  misc_feature 1..20: note = Target: ANGPTL4; (-) strand; PAM type: NRG; PAM sequence: TGG
  source 1..20: mol_type = other DNA
tcagcgtttcttccttctgg

SEQ ID NO: 9521 - DNA, 20 bp, synthetic construct
  misc_feature 1..20: note = Description of Artificial Sequence: Synthetic oligonucleotide
  misc_feature 1..20: note = Target: ANGPTL4; (-) strand; PAM type: NRG; PAM sequence: TGG
  source 1..20: mol_type = other DNA
tgttcagcgtttcttccttc

SEQ ID NO: 9522 - DNA, 20 bp, synthetic construct
  misc_feature 1..20: note = Description of Artificial Sequence: Synthetic oligonucleotide
  misc_feature 1..20: note = Target: ANGPTL4; (-) strand; PAM type: NRG; PAM sequence: CAG
  source 1..20: mol_type = other DNA
ttctgatgttcaggtgtgtt

SEQ ID NO: 9523 - DNA, 20 bp, synthetic construct
  misc_feature 1..20: note = Description of Artificial Sequence: Synthetic oligonucleotide
  misc_feature 1..20: note = Target: ANGPTL4; (-) strand; PAM type: NRG; PAM sequence: AGG
  source 1..20: mol_type = other DNA
gtttgtttcttctgatgttc

SEQ ID NO: 9524 - DNA, 20 bp, synthetic construct
  misc_feature 1..20: note = Description of Artificial Sequence: Synthetic oligonucleotide
  misc_feature 1..20: note = Target: ANGPTL4; (-) strand; PAM type: NRG; PAM sequence: CAG
  source 1..20: mol_type = other DNA
agtttgtttcttctgatgtt

SEQ ID NO: 9525 - DNA, 20 bp, synthetic construct
  misc_feature 1..20: note = Description of Artificial Sequence: Synthetic oligonucleotide
  misc_feature 1..20: note = Target: ANGPTL4; (-) strand; PAM type: NRG; PAM sequence: GAG
  source 1..20: mol_type = other DNA
ctcttaaggtggcgcgtctg

SEQ ID NO: 9526 - DNA, 20 bp, synthetic construct
  misc_feature 1..20: note = Description of Artificial Sequence: Synthetic oligonucleotide
  misc_feature 1..20: note = Target: ANGPTL4; (-) strand; PAM type: NRG; PAM sequence: TGG
  source 1..20: mol_type = other DNA
agctcttaaggtggcgcgtc

SEQ ID NO: 9527 - DNA, 20 bp, synthetic construct
  misc_feature 1..20: note = Description of Artificial Sequence: Synthetic oligonucleotide
  misc_feature 1..20: note = Target: ANGPTL4; (-) strand; PAM type: NRG; PAM sequence: TGG
  source 1..20: mol_type = other DNA
aagtgttccagctcttaagg

SEQ ID NO: 9528 - DNA, 20 bp, synthetic construct
  misc_feature 1..20: note = Description of Artificial Sequence: Synthetic oligonucleotide
  misc_feature 1..20: note = Target: ANGPTL4; (-) strand; PAM type: NRG; PAM sequence: AGG
  source 1..20: mol_type = other DNA
ggtaagtgttccagctctta

SEQ ID NO: 9529 - DNA, 20 bp, synthetic construct
  misc_feature 1..20: note = Description of Artificial Sequence: Synthetic oligonucleotide
  misc_feature 1..20: note = Target: ANGPTL4; (-) strand; PAM type: NRG; PAM sequence: AAG
  source 1..20: mol_type = other DNA
cggtaagtgttccagctctt

SEQ ID NO: 9530 - DNA, 20 bp, synthetic construct
  misc_feature 1..20: note = Description of Artificial Sequence: Synthetic oligonucleotide
  misc_feature 1..20: note = Target: ANGPTL4; (-) strand; PAM type: NRG; PAM sequence: CAG
  source 1..20: mol_type = other DNA
gacccttgcggtaagtgttc

SEQ ID NO: 9531 - DNA, 20 bp, synthetic construct
  misc_feature 1..20: note = Description of Artificial Sequence: Synthetic oligonucleotide
  misc_feature 1..20: note = Target: ANGPTL4; (-) strand; PAM type: NRG; PAM sequence: AAG
  source 1..20: mol_type = other DNA
aagccatggacccttgcggt

SEQ ID NO: 9532 - DNA, 20 bp, synthetic construct
  misc_feature 1..20: note = Description of Artificial Sequence: Synthetic oligonucleotide
  misc_feature 1..20: note = Target: ANGPTL4; (-) strand; PAM type: NRG; PAM sequence: CGG
  source 1..20: mol_type = other DNA
aatgaagccatggacccttg

SEQ ID NO: 9533 - DNA, 20 bp, synthetic construct
  misc_feature 1..20: note = Description of Artificial Sequence: Synthetic oligonucleotide
  misc_feature 1..20: note = Target: ANGPTL4; (-) strand; PAM type: NRG; PAM sequence: TGG
  source 1..20: mol_type = other DNA
tgacttcaagaatgaagcca

SEQ ID NO: 9534 - DNA, 20 bp, synthetic construct
  misc_feature 1..20: note = Description of Artificial Sequence: Synthetic oligonucleotide
  misc_feature 1..20: note = Target: ANGPTL4; (-) strand; PAM type: NRG; PAM sequence: AAG
  source 1..20: mol_type = other DNA
tctcactgacttcaagaatg

SEQ ID NO: 9535 - DNA, 20 bp, synthetic construct
  misc_feature 1..20: note = Description of Artificial Sequence: Synthetic oligonucleotide
  misc_feature 1..20: note = Target: ANGPTL4; (-) strand; PAM type: NRG; PAM sequence: AAG
  source 1..20: mol_type = other DNA
ttcttggtctcactgacttc

SEQ ID NO: 9536 - DNA, 20 bp, synthetic construct
  misc_feature 1..20: note = Description of Artificial Sequence: Synthetic oligonucleotide
  misc_feature 1..20: note = Target: ANGPTL4; (-) strand; PAM type: NRG; PAM sequence: TGG
  source 1..20: mol_type = other DNA
atccggaattggggggttct

SEQ ID NO: 9537 - DNA, 20 bp, synthetic construct
  misc_feature 1..20: note = Description of Artificial Sequence: Synthetic oligonucleotide
  misc_feature 1..20: note = Target: ANGPTL4; (-) strand; PAM type: NRG; PAM sequence: GGG
  source 1..20: mol_type = other DNA
gcactgtatccggaattggg

SEQ ID NO: 9538 - DNA, 20 bp, synthetic construct
  misc_feature 1..20: note = Description of Artificial Sequence: Synthetic oligonucleotide
  misc_feature 1..20: note = Target: ANGPTL4; (-) strand; PAM type: NRG; PAM sequence: GGG
  source 1..20: mol_type = other DNA
ggcactgtatccggaattgg

SEQ ID NO: 9539 - DNA, 20 bp, synthetic construct
  misc_feature 1..20: note = Description of Artificial Sequence: Synthetic oligonucleotide
  misc_feature 1..20: note = Target: ANGPTL4; (-) strand; PAM type: NRG; PAM sequence: GGG
  source 1..20: mol_type = other DNA
tggcactgtatccggaattg

SEQ ID NO: 9540 - DNA, 20 bp, synthetic construct
  misc_feature 1..20: note = Description of Artificial Sequence: Synthetic oligonucleotide
  misc_feature 1..20: note = Target: ANGPTL4; (-) strand; PAM type: NRG; PAM sequence: GGG
  source 1..20: mol_type = other DNA
gtggcactgtatccggaatt

SEQ ID NO: 9541 - DNA, 20 bp, synthetic construct
  misc_feature 1..20: note = Description of Artificial Sequence: Synthetic oligonucleotide
  misc_feature 1..20: note = Target: ANGPTL4; (-) strand; PAM type: NRG; PAM sequence: TGG
  source 1..20: mol_type = other DNA
agtggcactgtatccggaat

SEQ ID NO: 9542 - DNA, 20 bp, synthetic construct
  misc_feature 1..20: note = Description of Artificial Sequence: Synthetic oligonucleotide
  misc_feature 1..20: note = Target: ANGPTL4; (-) strand; PAM type: NRG; PAM sequence: CGG
  source 1..20: mol_type = other DNA
gagtgcagtggcactgtatc

SEQ ID NO: 9543 - DNA, 20 bp, synthetic construct
  misc_feature 1..20: note = Description of Artificial Sequence: Synthetic oligonucleotide
  misc_feature 1..20: note = Target: ANGPTL4; (-) strand; PAM type: NRG; PAM sequence: TGG
  source 1..20: mol_type = other DNA
ttgcctgggctggagtgcag

SEQ ID NO: 9544 - DNA, 20 bp, synthetic construct
  misc_feature 1..20: note = Description of Artificial Sequence: Synthetic oligonucleotide
  misc_feature 1..20: note = Target: ANGPTL4; (-) strand; PAM type: NRG; PAM sequence: CAG
  source 1..20: mol_type = other DNA
ctgttgcctgggctggagtg

SEQ ID NO: 9545 - DNA, 20 bp, synthetic construct
  misc_feature 1..20: note = Description of Artificial Sequence: Synthetic oligonucleotide
  misc_feature 1..20: note = Target: ANGPTL4; (-) strand; PAM type: NRG; PAM sequence: GAG
  source 1..20: mol_type = other DNA
tcgctctgttgcctgggctg

SEQ ID NO: 9546 - DNA, 20 bp, synthetic construct
  misc_feature 1..20: note = Description of Artificial Sequence: Synthetic oligonucleotide
  misc_feature 1..20: note = Target: ANGPTL4; (-) strand; PAM type: NRG; PAM sequence: TGG
  source 1..20: mol_type = other DNA
tctcgctctgttgcctgggc

SEQ ID NO: 9547 - DNA, 20 bp, synthetic construct
  misc_feature 1..20: note = Description of Artificial Sequence: Synthetic oligonucleotide
  misc_feature 1..20: note = Target: ANGPTL4; (-) strand; PAM type: NRG; PAM sequence: GGG
  source 1..20: mol_type = other DNA
agaatctcgctctgttgcct

SEQ ID NO: 9548 - DNA, 20 bp, synthetic construct
  misc_feature 1..20: note = Description of Artificial Sequence: Synthetic oligonucleotide
  misc_feature 1..20: note = Target: ANGPTL4; (-) strand; PAM type: NRG; PAM sequence: TGG
  source 1..20: mol_type = other DNA
cagaatctcgctctgttgcc

SEQ ID NO: 9549 - DNA, 20 bp, synthetic construct
  misc_feature 1..20: note = Description of Artificial Sequence: Synthetic oligonucleotide
  misc_feature 1..20: note = Target: ANGPTL4; (-) strand; PAM type: NRG; PAM sequence: CAG
  source 1..20: mol_type = other DNA
ttatttatttattttttaga

SEQ ID NO: 9550 - DNA, 20 bp, synthetic construct
  misc_feature 1..20: note = Description of Artificial Sequence: Synthetic oligonucleotide
  misc_feature 1..20: note = Target: ANGPTL4; (-) strand; PAM type: NRG; PAM sequence: TAG
  source 1..20: mol_type = other DNA
atatttatttatttattttt

SEQ ID NO: 9551 - DNA, 20 bp, synthetic construct
  misc_feature 1..20: note = Description of Artificial Sequence: Synthetic oligonucleotide
  misc_feature 1..20: note = Target: ANGPTL4; (-) strand; PAM type: NRG; PAM sequence: GGG
  source 1..20: mol_type = other DNA
aaatacatgtcctagatgta

SEQ ID NO: 9552 - DNA, 20 bp, synthetic construct
  misc_feature 1..20: note = Description of Artificial Sequence: Synthetic oligonucleotide
  misc_feature 1..20: note = Target: ANGPTL4; (-) strand; PAM type: NRG; PAM sequence: AGG
  source 1..20: mol_type = other DNA
caaatacatgtcctagatgt

SEQ ID NO: 9553 - DNA, 20 bp, synthetic construct
  misc_feature 1..20: note = Description of Artificial Sequence: Synthetic oligonucleotide
  misc_feature 1..20: note = Target: ANGPTL4; (-) strand; PAM type: NRG; PAM sequence: TAG
  source 1..20: mol_type = other DNA
tcaaatacatgtcctagatg

SEQ ID NO: 9554 - DNA, 20 bp, synthetic construct
  misc_feature 1..20: note = Description of Artificial Sequence: Synthetic oligonucleotide
  misc_feature 1..20: note = Target: ANGPTL4; (-) strand; PAM type: NRG; PAM sequence: TAG
  source 1..20: mol_type = other DNA
ttttcctcaaatacatgtcc

SEQ ID NO: 9555 - DNA, 20 bp, synthetic construct
  misc_feature 1..20: note = Description of Artificial Sequence: Synthetic oligonucleotide
  misc_feature 1..20: note = Target: ANGPTL4; (-) strand; PAM type: NRG; PAM sequence: TGG
  source 1..20: mol_type = other DNA
gttcagaaaatggacagatg

SEQ ID NO: 9556 - DNA, 20 bp, synthetic construct
  misc_feature 1..20: note = Description of Artificial Sequence: Synthetic oligonucleotide
  misc_feature 1..20: note = Target: ANGPTL4; (-) strand; PAM type: NRG; PAM sequence: CAG
  source 1..20: mol_type = other DNA
gctggggttcagaaaatgga

SEQ ID NO: 9557 - DNA, 20 bp, synthetic construct
  misc_feature 1..20: note = Description of Artificial Sequence: Synthetic oligonucleotide
  misc_feature 1..20: note = Target: ANGPTL4; (-) strand; PAM type: NRG; PAM sequence: TGG
  source 1..20: mol_type = other DNA
agcagctggggttcagaaaa

SEQ ID NO: 9558 - DNA, 20 bp, synthetic construct
  misc_feature 1..20: note = Description of Artificial Sequence: Synthetic oligonucleotide
  misc_feature 1..20: note = Target: ANGPTL4; (-) strand; PAM type: NRG; PAM sequence: CAG
  source 1..20: mol_type = other DNA
aattaacagcagctggggtt

SEQ ID NO: 9559 - DNA, 20 bp, synthetic construct
  misc_feature 1..20: note = Description of Artificial Sequence: Synthetic oligonucleotide
  misc_feature 1..20: note = Target: ANGPTL4; (-) strand; PAM type: NRG; PAM sequence: GGG
  source 1..20: mol_type = other DNA
aaaaaaattaacagcagctg

SEQ ID NO: 9560 - DNA, 20 bp, synthetic construct
  misc_feature 1..20: note = Description of Artificial Sequence: Synthetic oligonucleotide
  misc_feature 1..20: note = Target: ANGPTL4; (-) strand; PAM type: NRG; PAM sequence: GGG
  source 1..20: mol_type = other DNA
aaaaaaaattaacagcagct

SEQ ID NO: 9561 - DNA, 20 bp, synthetic construct
  misc_feature 1..20: note = Description of Artificial Sequence: Synthetic oligonucleotide
  misc_feature 1..20: note = Target: ANGPTL4; (-) strand; PAM type: NRG; PAM sequence: TGG
  source 1..20: mol_type = other DNA
aaaaaaaaattaacagcagc

SEQ ID NO: 9562 - DNA, 20 bp, synthetic construct
  misc_feature 1..20: note = Description of Artificial Sequence: Synthetic oligonucleotide
  misc_feature 1..20: note = Target: ANGPTL4; (-) strand; PAM type: NRG; PAM sequence: CAG
  source 1..20: mol_type = other DNA
aaaaaaaaaaaaattaacag

SEQ ID NO: 9563 - DNA, 20 bp, synthetic construct
  misc_feature 1..20: note = Description of Artificial Sequence: Synthetic oligonucleotide
  misc_feature 1..20: note = Target: ANGPTL4; (-) strand; PAM type: NRG; PAM sequence: CAG
  source 1..20: mol_type = other DNA
aaaaaaaaaaaaaaaattaa

SEQ ID NO: 9564 - DNA, 20 bp, synthetic construct
  misc_feature 1..20: note = Description of Artificial Sequence: Synthetic oligonucleotide
  misc_feature 1..20: note = Target: ANGPTL4; (-) strand; PAM type: NRG; PAM sequence: CGG
  source 1..20: mol_type = other DNA
acagagtgagactcttgtct

SEQ ID NO: 9565 - DNA, 20 bp, synthetic construct
  misc_feature 1..20: note = Description of Artificial Sequence: Synthetic oligonucleotide
  misc_feature 1..20: note = Target: ANGPTL4; (-) strand; PAM type: NRG; PAM sequence: GAG
  source 1..20: mol_type = other DNA
tccagcctgggtgacagagt

SEQ ID NO: 9566 - DNA, 20 bp, synthetic construct
  misc_feature 1..20: note = Description of Artificial Sequence: Synthetic oligonucleotide
  misc_feature 1..20: note = Target: ANGPTL4; (-) strand; PAM type: NRG; PAM sequence: GAG
  source 1..20: mol_type = other DNA
gcgctccagcctgggtgaca

SEQ ID NO: 9567 - DNA, 20 bp, synthetic construct
  misc_feature 1..20: note = Description of Artificial Sequence: Synthetic oligonucleotide
  misc_feature 1..20: note = Target: ANGPTL4; (-) strand; PAM type: NRG; PAM sequence: CAG
  source 1..20: mol_type = other DNA
ccgcgctccagcctgggtga

SEQ ID NO: 9568 - DNA, 20 bp, synthetic construct
  misc_feature 1..20: note = Description of Artificial Sequence: Synthetic oligonucleotide
  misc_feature 1..20: note = Target: ANGPTL4; (-) strand; PAM type: NRG; PAM sequence: GGG
  source 1..20: mol_type = other DNA
gcactaccgcgctccagcct

SEQ ID NO: 9569 - DNA, 20 bp, synthetic construct
  misc_feature 1..20: note = Description of Artificial Sequence: Synthetic oligonucleotide
  misc_feature 1..20: note = Target: ANGPTL4; (-) strand; PAM type: NRG; PAM sequence: TGG
  source 1..20: mol_type = other DNA
cgcactaccgcgctccagcc

SEQ ID NO: 9570 - DNA, 20 bp, synthetic construct
  misc_feature 1..20: note = Description of Artificial Sequence: Synthetic oligonucleotide
  misc_feature 1..20: note = Target: ANGPTL4; (-) strand; PAM type: NRG; PAM sequence: CAG
  source 1..20: mol_type = other DNA
gagatcgcactaccgcgctc

SEQ ID NO: 9571 - DNA, 20 bp, synthetic construct
  misc_feature 1..20: note = Description of Artificial Sequence: Synthetic oligonucleotide
  misc_feature 1..20: note = Target: ANGPTL4; (-) strand; PAM type: NRG; PAM sequence: GAG
  source 1..20: mol_type = other DNA
ggtggaggttgcagtaagct

SEQ ID NO: 9572 - DNA, 20 bp, synthetic construct
  misc_feature 1..20: note = Description of Artificial Sequence: Synthetic oligonucleotide
  misc_feature 1..20: note = Target: ANGPTL4; (-) strand; PAM type: NRG; PAM sequence: AAG
  source 1..20: mol_type = other DNA
cgggaggtggaggttgcagt

SEQ ID NO: 9573 - DNA, 20 bp, synthetic construct
  misc_feature 1..20: note = Description of Artificial Sequence: Synthetic oligonucleotide
  misc_feature 1..20: note = Target: ANGPTL4; (-) strand; PAM type: NRG; PAM sequence: CAG
  source 1..20: mol_type = other DNA
aacccgggaggtggaggttg

SEQ ID NO: 9574 - DNA, 20 bp, synthetic construct
  misc_feature 1..20: note = Description of Artificial Sequence: Synthetic oligonucleotide
  misc_feature 1..20: note = Target: ANGPTL4; (-) strand; PAM type: NRG; PAM sequence: AGG
  source 1..20: mol_type = other DNA
cgcttgaacccgggaggtgg

SEQ ID NO: 9575 - DNA, 20 bp, synthetic construct
  misc_feature 1..20: note = Description of Artificial Sequence: Synthetic oligonucleotide
  misc_feature 1..20: note = Target: ANGPTL4; (-) strand; PAM type: NRG; PAM sequence: GAG
  source 1..20: mol_type = other DNA
tcgcttgaacccgggaggtg

SEQ ID NO: 9576 - DNA, 20 bp, synthetic construct
  misc_feature 1..20: note = Description of Artificial Sequence: Synthetic oligonucleotide
  misc_feature 1..20: note = Target: ANGPTL4; (-) strand; PAM type: NRG; PAM sequence: TGG
  source 1..20: mol_type = other DNA
aatcgcttgaacccgggagg

SEQ ID NO: 9577 - DNA, 20 bp, synthetic construct
  misc_feature 1..20: note = Description of Artificial Sequence: Synthetic oligonucleotide
  misc_feature 1..20: note = Target: ANGPTL4; (-) strand; PAM type: NRG; PAM sequence: AGG
  source 1..20: mol_type = other DNA
gagaatcgcttgaacccggg

SEQ ID NO: 9578 - DNA, 20 bp, synthetic construct
  misc_feature 1..20: note = Description of Artificial Sequence: Synthetic oligonucleotide
  misc_feature 1..20: note = Target: ANGPTL4; (-) strand; PAM type: NRG; PAM sequence: GAG
  source 1..20: mol_type = other DNA
ggagaatcgcttgaacccgg

SEQ ID NO: 9579 - DNA, 20 bp, synthetic construct
  misc_feature 1..20: note = Description of Artificial Sequence: Synthetic oligonucleotide
  misc_feature 1..20: note = Target: ANGPTL4; (-) strand; PAM type: NRG; PAM sequence: GGG
  source 1..20: mol_type = other DNA
caggagaatcgcttgaaccc

SEQ ID NO: 9580 - DNA, 20 bp, synthetic construct
  misc_feature 1..20: note = Description of Artificial Sequence: Synthetic oligonucleotide
  misc_feature 1..20: note = Target: ANGPTL4; (-) strand; PAM type: NRG; PAM sequence: CGG
  source 1..20: mol_type = other DNA
gcaggagaatcgcttgaacc

SEQ ID NO: 9581 - DNA, 20 bp, synthetic construct
  misc_feature 1..20: note = Description of Artificial Sequence: Synthetic oligonucleotide
  misc_feature 1..20: note = Target: ANGPTL4; (-) strand; PAM type: NRG; PAM sequence: GAG
  source 1..20: mol_type = other DNA
tactcgggaggccgaggcag

SEQ ID NO: 9582 - DNA, 20 bp, synthetic construct
  misc_feature 1..20: note = Description of Artificial Sequence: Synthetic oligonucleotide
  misc_feature 1..20: note = Target: ANGPTL4; (-) strand; PAM type: NRG; PAM sequence: AGG
  source 1..20: mol_type = other DNA
gctactcgggaggccgaggc

SEQ ID NO: 9583 - DNA, 20 bp, synthetic construct
  misc_feature 1..20: note = Description of Artificial Sequence: Synthetic oligonucleotide
  misc_feature 1..20: note = Target: ANGPTL4; (-) strand; PAM type: NRG; PAM sequence: CAG
  source 1..20: mol_type = other DNA
agctactcgggaggccgagg

SEQ ID NO: 9584 - DNA, 20 bp, synthetic construct
  misc_feature 1..20: note = Description of Artificial Sequence: Synthetic oligonucleotide
  misc_feature 1..20: note = Target: ANGPTL4; (-) strand; PAM type: NRG; PAM sequence: AGG
  source 1..20: mol_type = other DNA
ctcagctactcgggaggccg

SEQ ID NO: 9585 - DNA, 20 bp, synthetic construct
  misc_feature 1..20: note = Description of Artificial Sequence: Synthetic oligonucleotide
  misc_feature 1..20: note = Target: ANGPTL4; (-) strand; PAM type: NRG; PAM sequence: GAG
  source 1..20: mol_type = other DNA
tctcagctactcgggaggcc

SEQ ID NO: 9586 - DNA, 20 bp, synthetic construct
  misc_feature 1..20: note = Description of Artificial Sequence: Synthetic oligonucleotide
  misc_feature 1..20: note = Target: ANGPTL4; (-) strand; PAM type: NRG; PAM sequence: AGG
  source 1..20: mol_type = other DNA
tgtaatctcagctactcggg

SEQ ID NO: 9587 - DNA, 20 bp, synthetic construct
  misc_feature 1..20: note = Description of Artificial Sequence: Synthetic oligonucleotide
  misc_feature 1..20: note = Target: ANGPTL4; (-) strand; PAM type: NRG; PAM sequence: GAG
  source 1..20: mol_type = other DNA
ctgtaatctcagctactcgg

SEQ ID NO: 9588 - DNA, 20 bp, synthetic construct
  misc_feature 1..20: note = Description of Artificial Sequence: Synthetic oligonucleotide
  misc_feature 1..20: note = Target: ANGPTL4; (-) strand; PAM type: NRG; PAM sequence: GGG
  source 1..20: mol_type = other DNA
gcctgtaatctcagctactc

SEQ ID NO: 9589 - DNA, 20 bp, synthetic construct
  misc_feature 1..20: note = Description of Artificial Sequence: Synthetic oligonucleotide
  misc_feature 1..20: note = Target: ANGPTL4; (-) strand; PAM type: NRG; PAM sequence: CGG
  source 1..20: mol_type = other DNA
cgcctgtaatctcagctact

SEQ ID NO: 9590 - DNA, 20 bp, synthetic construct
  misc_feature 1..20: note = Description of Artificial Sequence: Synthetic oligonucleotide
  misc_feature 1..20: note = Target: ANGPTL4; (-) strand; PAM type: NRG; PAM sequence: CAG
  source 1..20: mol_type = other DNA
gtgggaggcgcctgtaatct

SEQ ID NO: 9591 - DNA, 20 bp, synthetic construct
  misc_feature 1..20: note = Description of Artificial Sequence: Synthetic oligonucleotide
  misc_feature 1..20: note = Target: ANGPTL4; (-) strand; PAM type: NRG; PAM sequence: AGG
  source 1..20: mol_type = other DNA
aattagctgggtgcagtggg

SEQ ID NO: 9592 - DNA, 20 bp, synthetic construct
  misc_feature 1..20: note = Description of Artificial Sequence: Synthetic oligonucleotide
  misc_feature 1..20: note = Target: ANGPTL4; (-) strand; PAM type: NRG; PAM sequence: GAG
  source 1..20: mol_type = other DNA
aaattagctgggtgcagtgg

SEQ ID NO: 9593 - DNA, 20 bp, synthetic construct
  misc_feature 1..20: note = Description of Artificial Sequence: Synthetic oligonucleotide
  misc_feature 1..20: note = Target: ANGPTL4; (-) strand; PAM type: NRG; PAM sequence: GGG
  source 1..20: mol_type = other DNA
aaaaattagctgggtgcagt

SEQ ID NO: 9594 - DNA, 20 bp, synthetic construct
  misc_feature 1..20: note = Description of Artificial Sequence: Synthetic oligonucleotide
  misc_feature 1..20: note = Target: ANGPTL4; (-) strand; PAM type: NRG; PAM sequence: TGG
  source 1..20: mol_type = other DNA
caaaaattagctgggtgcag

SEQ ID NO: 9595 - DNA, 20 bp, synthetic construct
  misc_feature 1..20: note = Description of Artificial Sequence: Synthetic oligonucleotide
  misc_feature 1..20: note = Target: ANGPTL4; (-) strand; PAM type: NRG; PAM sequence: CAG
  source 1..20: mol_type = other DNA
atacaaaaattagctgggtg

SEQ ID NO: 9596 - DNA, 20 bp, synthetic construct
  misc_feature 1..20: note = Description of Artificial Sequence: Synthetic oligonucleotide
  misc_feature 1..20: note = Target: ANGPTL4; (-) strand; PAM type: NRG; PAM sequence: GGG
  source 1..20: mol_type = other DNA
taaaaatacaaaaattagct

SEQ ID NO: 9597 - DNA, 20 bp, synthetic construct
  misc_feature 1..20: note = Description of Artificial Sequence: Synthetic oligonucleotide
  misc_feature 1..20: note = Target: ANGPTL4; (-) strand; PAM type: NRG; PAM sequence: TGG
  source 1..20: mol_type = other DNA
ctaaaaatacaaaaattagc

SEQ ID NO: 9598 - DNA, 20 bp, synthetic construct
  misc_feature 1..20: note = Description of Artificial Sequence: Synthetic oligonucleotide
  misc_feature 1..20: note = Target: ANGPTL4; (-) strand; PAM type: NRG; PAM sequence: TAG
  source 1..20: mol_type = other DNA
tatactaaaaatacaaaaat

SEQ ID NO: 9599 - DNA, 20 bp, synthetic construct
  misc_feature 1..20: note = Description of Artificial Sequence: Synthetic oligonucleotide
  misc_feature 1..20: note = Target: ANGPTL4; (-) strand; PAM type: NRG; PAM sequence: TGG
  source 1..20: mol_type = other DNA
tcaggagtttgagaccagcc

SEQ ID NO: 9600 - DNA, 20 bp, synthetic construct
  misc_feature 1..20: note = Description of Artificial Sequence: Synthetic oligonucleotide
  misc_feature 1..20: note = Target: ANGPTL4; (-) strand; PAM type: NRG; PAM sequence: CAG
  source 1..20: mol_type = other DNA
tgaggtcaggagtttgagac

SEQ ID NO: 9601 - DNA, 20 bp, synthetic construct
  misc_feature 1..20: note = Description of Artificial Sequence: Synthetic oligonucleotide
  misc_feature 1..20: note = Target: ANGPTL4; (-) strand; PAM type: NRG; PAM sequence: GAG
  source 1..20: mol_type = other DNA
tcacttgaggtcaggagttt

SEQ ID NO: 9602 - DNA, 20 bp, synthetic construct
  misc_feature 1..20: note = Description of Artificial Sequence: Synthetic oligonucleotide
  misc_feature 1..20: note = Target: ANGPTL4; (-) strand; PAM type: NRG; PAM sequence: GAG
  source 1..20: mol_type = other DNA
ggcagatcacttgaggtcag

SEQ ID NO: 9603 - DNA, 20 bp, synthetic construct
  misc_feature 1..20: note = Description of Artificial Sequence: Synthetic oligonucleotide
  misc_feature 1..20: note = Target: ANGPTL4; (-) strand; PAM type: NRG; PAM sequence: AGG
  source 1..20: mol_type = other DNA
cgggcagatcacttgaggtc

SEQ ID NO: 9604 - DNA, 20 bp, synthetic construct
  misc_feature 1..20: note = Description of Artificial Sequence: Synthetic oligonucleotide
  misc_feature 1..20: note = Target: ANGPTL4; (-) strand; PAM type: NRG; PAM sequence: CAG
  source 1..20: mol_type = other DNA
gcgggcagatcacttgaggt

SEQ ID NO: 9605 - DNA, 20 bp, synthetic construct
  misc_feature 1..20: note = Description of Artificial Sequence: Synthetic oligonucleotide
  misc_feature 1..20: note = Target: ANGPTL4; (-) strand; PAM type: NRG; PAM sequence: AGG
  source 1..20: mol_type = other DNA
cgaggcgggcagatcacttg

SEQ ID NO: 9606 - DNA, 20 bp, synthetic construct
  misc_feature 1..20: note = Description of Artificial Sequence: Synthetic oligonucleotide
  misc_feature 1..20: note = Target: ANGPTL4; (-) strand; PAM type: NRG; PAM sequence: GAG
  source 1..20: mol_type = other DNA
ccgaggcgggcagatcactt

SEQ ID NO: 9607 - DNA, 20 bp, synthetic construct
  misc_feature 1..20: note = Description of Artificial Sequence: Synthetic oligonucleotide
  misc_feature 1..20: note = Target: ANGPTL4; (-) strand; PAM type: NRG; PAM sequence: CAG
  source 1..20: mol_type = other DNA
gtttcggaggccgaggcggg

SEQ ID NO: 9608 - DNA, 20 bp, synthetic construct
  misc_feature 1..20: note = Description of Artificial Sequence: Synthetic oligonucleotide
  misc_feature 1..20: note = Target: ANGPTL4; (-) strand; PAM type: NRG; PAM sequence: GGG
  source 1..20: mol_type = other DNA
ccagtttcggaggccgaggc

SEQ ID NO: 9609 - DNA, 20 bp, synthetic construct
  misc_feature 1..20: note = Description of Artificial Sequence: Synthetic oligonucleotide
  misc_feature 1..20: note = Target: ANGPTL4; (-) strand; PAM type: NRG; PAM sequence: CGG
  source 1..20: mol_type = other DNA
accagtttcggaggccgagg

SEQ ID NO: 9610 - DNA, 20 bp, synthetic construct
  misc_feature 1..20: note = Description of Artificial Sequence: Synthetic oligonucleotide
  misc_feature 1..20: note = Target: ANGPTL4; (-) strand; PAM type: NRG; PAM sequence: AGG
  source 1..20: mol_type = other DNA
cccaccagtttcggaggccg

SEQ ID NO: 9611 - DNA, 20 bp, synthetic construct
  misc_feature 1..20: note = Description of Artificial Sequence: Synthetic oligonucleotide
  misc_feature 1..20: note = Target: ANGPTL4; (-) strand; PAM type: NRG; PAM sequence: GAG
  source 1..20: mol_type = other DNA
tcccaccagtttcggaggcc

SEQ ID NO: 9612 - DNA, 20 bp, synthetic construct
  misc_feature 1..20: note = Description of Artificial Sequence: Synthetic oligonucleotide
  misc_feature 1..20: note = Target: ANGPTL4; (-) strand; PAM type: NRG; PAM sequence: AGG
  source 1..20: mol_type = other DNA
tgtaatcccaccagtttcgg

SEQ ID NO: 9613 - DNA, 20 bp, synthetic construct
  misc_feature 1..20: note = Description of Artificial Sequence: Synthetic oligonucleotide
  misc_feature 1..20: note = Target: ANGPTL4; (-) strand; PAM type: NRG; PAM sequence: GAG
  source 1..20: mol_type = other DNA
ctgtaatcccaccagtttcg

SEQ ID NO: 9614 - DNA, 20 bp, synthetic construct
  misc_feature 1..20: note = Description of Artificial Sequence: Synthetic oligonucleotide
  misc_feature 1..20: note = Target: ANGPTL4; (-) strand; PAM type: NRG; PAM sequence: CGG
  source 1..20: mol_type = other DNA
gcctgtaatcccaccagttt

SEQ ID NO: 9615 - DNA, 20 bp, synthetic construct
  misc_feature 1..20: note = Description of Artificial Sequence: Synthetic oligonucleotide
  misc_feature 1..20: note = Target: ANGPTL4; (-) strand; PAM type: NRG; PAM sequence: CAG
  source 1..20: mol_type = other DNA
gcttgcgcctgtaatcccac

SEQ ID NO: 9616 - DNA, 20 bp, synthetic construct
  misc_feature 1..20: note = Description of Artificial Sequence: Synthetic oligonucleotide
  misc_feature 1..20: note = Target: ANGPTL4; (-) strand; PAM type: NRG; PAM sequence: TGG
  source 1..20: mol_type = other DNA
aattaacaggccgggcacag

SEQ ID NO: 9617 - DNA, 20 bp, synthetic construct
  misc_feature 1..20: note = Description of Artificial Sequence: Synthetic oligonucleotide
  misc_feature 1..20: note = Target: ANGPTL4; (-) strand; PAM type: NRG; PAM sequence: CAG
  source 1..20: mol_type = other DNA
ataaattaacaggccgggca

SEQ ID NO: 9618 - DNA, 20 bp, synthetic construct
  misc_feature 1..20: note = Description of Artificial Sequence: Synthetic oligonucleotide
  misc_feature 1..20: note = Target: ANGPTL4; (-) strand; PAM type: NRG; PAM sequence: GGG
  source 1..20: mol_type = other DNA
caaaaataaattaacaggcc

SEQ ID NO: 9619 - DNA, 20 bp, synthetic construct
  misc_feature 1..20: note = Description of Artificial Sequence: Synthetic oligonucleotide
  misc_feature 1..20: note = Target: ANGPTL4; (-) strand; PAM type: NRG; PAM sequence: CGG
  source 1..20: mol_type = other DNA
gcaaaaataaattaacaggc

SEQ ID NO: 9620 - DNA, 20 bp, synthetic construct
  misc_feature 1..20: note = Description of Artificial Sequence: Synthetic oligonucleotide
  misc_feature 1..20: note = Target: ANGPTL4; (-) strand; PAM type: NRG; PAM sequence: AGG
  source 1..20: mol_type = other DNA
tggggcaaaaataaattaac

SEQ ID NO: 9621 - DNA, 20 bp, synthetic construct
  misc_feature 1..20: note = Description of Artificial Sequence: Synthetic oligonucleotide
  misc_feature 1..20: note = Target: ANGPTL4; (-) strand; PAM type: NRG; PAM sequence: CAG
  source 1..20: mol_type = other DNA
ctggggcaaaaataaattaa

SEQ ID NO: 9622 - DNA, 20 bp, synthetic construct
  misc_feature 1..20: note = Description of Artificial Sequence: Synthetic oligonucleotide
  misc_feature 1..20: note = Target: ANGPTL4; (-) strand; PAM type: NRG; PAM sequence: GGG
  source 1..20: mol_type = other DNA
atatttggagggagatactg

SEQ ID NO: 9623 - DNA, 20 bp, synthetic construct
  misc_feature 1..20: note = Description of Artificial Sequence: Synthetic oligonucleotide
  misc_feature 1..20: note = Target: ANGPTL4; (-) strand; PAM type: NRG; PAM sequence: GGG
  source 1..20: mol_type = other DNA
aatatttggagggagatact

SEQ ID NO: 9624 - DNA, 20 bp, synthetic construct
  misc_feature 1..20: note = Description of Artificial Sequence: Synthetic oligonucleotide
  misc_feature 1..20: note = Target: ANGPTL4; (-) strand; PAM type: NRG; PAM sequence: TGG
  source 1..20: mol_type = other DNA
gaatatttggagggagatac

SEQ ID NO: 9625 - DNA, 20 bp, synthetic construct
  misc_feature 1..20: note = Description of Artificial Sequence: Synthetic oligonucleotide
  misc_feature 1..20: note = Target: ANGPTL4; (-) strand; PAM type: NRG; PAM sequence: GAG
  source 1..20: mol_type = other DNA
ctataaggaatatttggagg

SEQ ID NO: 9626 - DNA, 20 bp, synthetic construct
  misc_feature 1..20: note = Description of Artificial Sequence: Synthetic oligonucleotide
  misc_feature 1..20: note = Target: ANGPTL4; (-) strand; PAM type: NRG; PAM sequence: GGG
  source 1..20: mol_type = other DNA
atctataaggaatatttgga

SEQ ID NO: 9627 - DNA, 20 bp, synthetic construct
  misc_feature 1..20: note = Description of Artificial Sequence: Synthetic oligonucleotide
  misc_feature 1..20: note = Target: ANGPTL4; (-) strand; PAM type: NRG; PAM sequence: AGG
  source 1..20: mol_type = other DNA
catctataaggaatatttgg

SEQ ID NO: 9628 - DNA, 20 bp, synthetic construct
  misc_feature 1..20: note = Description of Artificial Sequence: Synthetic oligonucleotide
  misc_feature 1..20: note = Target: ANGPTL4; (-) strand; PAM type: NRG; PAM sequence: GAG
  source 1..20: mol_type = other DNA
acatctataaggaatatttg

SEQ ID NO: 9629 - DNA, 20 bp, synthetic construct
  misc_feature 1..20: note = Description of Artificial Sequence: Synthetic oligonucleotide
  misc_feature 1..20: note = Target: ANGPTL4; (-) strand; PAM type: NRG; PAM sequence: TGG
  source 1..20: mol_type = other DNA
agacatctataaggaatatt

SEQ ID NO: 9630 - DNA, 20 bp, synthetic construct
  misc_feature 1..20: note = Description of Artificial Sequence: Synthetic oligonucleotide
  misc_feature 1..20: note = Target: ANGPTL4; (-) strand; PAM type: NRG; PAM sequence: AGG
  source 1..20: mol_type = other DNA
ctccccaagagacatctata

SEQ ID NO: 9631 - DNA, 20 bp, synthetic construct
  misc_feature 1..20: note = Description of Artificial Sequence: Synthetic oligonucleotide
  misc_feature 1..20: note = Target: ANGPTL4; (-) strand; PAM type: NRG; PAM sequence: AAG
  source 1..20: mol_type = other DNA
cctccccaagagacatctat

SEQ ID NO: 9632 - DNA, 20 bp, synthetic construct
  misc_feature 1..20: note = Description of Artificial Sequence: Synthetic oligonucleotide
  misc_feature 1..20: note = Target: ANGPTL4; (-) strand; PAM type: NRG; PAM sequence: GAG
  source 1..20: mol_type = other DNA
aacccccaccacctccccaa

SEQ ID NO: 9633 - DNA, 20 bp, synthetic construct
  misc_feature 1..20: note = Description of Artificial Sequence: Synthetic oligonucleotide
  misc_feature 1..20: note = Target: ANGPTL4; (-) strand; PAM type: NRG; PAM sequence: AAG
  source 1..20: mol_type = other DNA
agaacccccaccacctcccc

SEQ ID NO: 9634 - DNA, 20 bp, synthetic construct
  misc_feature 1..20: note = Description of Artificial Sequence: Synthetic oligonucleotide
  misc_feature 1..20: note = Target: ANGPTL4; (-) strand; PAM type: NRG; PAM sequence: AAG
  source 1..20: mol_type = other DNA
gatattttttcttctagcgc

SEQ ID NO: 9635 - DNA, 20 bp, synthetic construct
  misc_feature 1..20: note = Description of Artificial Sequence: Synthetic oligonucleotide
  misc_feature 1..20: note = Target: ANGPTL4; (-) strand; PAM type: NRG; PAM sequence: TAG
  source 1..20: mol_type = other DNA
atcacagatattttttcttc

SEQ ID NO: 9636 - DNA, 20 bp, synthetic construct
  misc_feature 1..20: note = Description of Artificial Sequence: Synthetic oligonucleotide
  misc_feature 1..20: note = Target: ANGPTL4; (-) strand; PAM type: NRG; PAM sequence: CAG
  source 1..20: mol_type = other DNA
gggtcaagacaaggaaatca

SEQ ID NO: 9637 - DNA, 20 bp, synthetic construct
  misc_feature 1..20: note = Description of Artificial Sequence: Synthetic oligonucleotide
  misc_feature 1..20: note = Target: ANGPTL4; (-) strand; PAM type: NRG; PAM sequence: AGG
  source 1..20: mol_type = other DNA
tgccaggaagggtcaagaca

SEQ ID NO: 9638 - DNA, 20 bp, synthetic construct
  misc_feature 1..20: note = Description of Artificial Sequence: Synthetic oligonucleotide
  misc_feature 1..20: note = Target: ANGPTL4; (-) strand; PAM type: NRG; PAM sequence: AAG
  source 1..20: mol_type = other DNA
ctgccaggaagggtcaagac

SEQ ID NO: 9639 - DNA, 20 bp, synthetic construct
  misc_feature 1..20: note = Description of Artificial Sequence: Synthetic oligonucleotide
  misc_feature 1..20: note = Target: ANGPTL4; (-) strand; PAM type: NRG; PAM sequence: AAG
  source 1..20: mol_type = other DNA
agcacctgccaggaagggtc

SEQ ID NO: 9640 - DNA, 20 bp, synthetic construct
  misc_feature 1..20: note = Description of Artificial Sequence: Synthetic oligonucleotide
  misc_feature 1..20: note = Target: ANGPTL4; (-) strand; PAM type: NRG; PAM sequence: GGG
  source 1..20: mol_type = other DNA
tccccagcacctgccaggaa

SEQ ID NO: 9641 - DNA, 20 bp, synthetic construct
  misc_feature 1..20: note = Description of Artificial Sequence: Synthetic oligonucleotide
  misc_feature 1..20: note = Target: ANGPTL4; (-) strand; PAM type: NRG; PAM sequence: AGG
  source 1..20: mol_type = other DNA
gtccccagcacctgccagga

SEQ ID NO: 9642 - DNA, 20 bp, synthetic construct
  misc_feature 1..20: note = Description of Artificial Sequence: Synthetic oligonucleotide
  misc_feature 1..20: note = Target: ANGPTL4; (-) strand; PAM type: NRG; PAM sequence: AAG
  source 1..20: mol_type = other DNA
tgtccccagcacctgccagg

SEQ ID NO: 9643 - DNA, 20 bp, synthetic construct
  misc_feature 1..20: note = Description of Artificial Sequence: Synthetic oligonucleotide
  misc_feature 1..20: note = Target: ANGPTL4; (-) strand; PAM type: NRG; PAM sequence: AGG
  source 1..20: mol_type = other DNA
ctgtgtccccagcacctgcc

SEQ ID NO: 9644 - DNA, 20 bp, synthetic construct
  misc_feature 1..20: note = Description of Artificial Sequence: Synthetic oligonucleotide
  misc_feature 1..20: note = Target: ANGPTL4; (-) strand; PAM type: NRG; PAM sequence: CAG
  source 1..20: mol_type = other DNA
gctgtgtccccagcacctgc

SEQ ID NO: 9645 - DNA, 20 bp, synthetic construct
  misc_feature 1..20: note = Description of Artificial Sequence: Synthetic oligonucleotide
  misc_feature 1..20: note = Target: ANGPTL4; (-) strand; PAM type: NRG; PAM sequence: CAG
  source 1..20: mol_type = other DNA
cagggaaacagctgtgtccc

SEQ ID NO: 9646 - DNA, 20 bp, synthetic construct
  misc_feature 1..20: note = Description of Artificial Sequence: Synthetic oligonucleotide
  misc_feature 1..20: note = Target: ANGPTL4; (-) strand; PAM type: NRG; PAM sequence: CAG
  source 1..20: mol_type = other DNA
cagccacagccccagggaaa

SEQ ID NO: 9647 - DNA, 20 bp, synthetic construct
  misc_feature 1..20: note = Description of Artificial Sequence: Synthetic oligonucleotide
  misc_feature 1..20: note = Target: ANGPTL4; (-) strand; PAM type: NRG; PAM sequence: GGG
  source 1..20: mol_type = other DNA
tatacccagccacagcccca

SEQ ID NO: 9648 - DNA, 20 bp, synthetic construct
  misc_feature 1..20: note = Description of Artificial Sequence: Synthetic oligonucleotide
  misc_feature 1..20: note = Target: ANGPTL4; (-) strand; PAM type: NRG; PAM sequence: AGG
  source 1..20: mol_type = other DNA
ctatacccagccacagcccc

SEQ ID NO: 9649 - DNA, 20 bp, synthetic construct
  misc_feature 1..20: note = Description of Artificial Sequence: Synthetic oligonucleotide
  misc_feature 1..20: note = Target: ANGPTL4; (-) strand; PAM type: NRG; PAM sequence: CAG
  source 1..20: mol_type = other DNA
cctatacccagccacagccc

SEQ ID NO: 9650 - DNA, 20 bp, synthetic construct
  misc_feature 1..20: note = Description of Artificial Sequence: Synthetic oligonucleotide
  misc_feature 1..20: note = Target: ANGPTL4; (-) strand; PAM type: NRG; PAM sequence: CAG
  source 1..20: mol_type = other DNA
ttgtcacctatacccagcca

SEQ ID NO: 9651 - DNA, 20 bp, synthetic construct
  misc_feature 1..20: note = Description of Artificial Sequence: Synthetic oligonucleotide
  misc_feature 1..20: note = Target: ANGPTL4; (-) strand; PAM type: NRG; PAM sequence: CAG
  source 1..20: mol_type = other DNA
aaaagtttgtcacctatacc

SEQ ID NO: 9652 - DNA, 20 bp, synthetic construct
  misc_feature 1..20: note = Description of Artificial Sequence: Synthetic oligonucleotide
  misc_feature 1..20: note = Target: ANGPTL4; (-) strand; PAM type: NRG; PAM sequence: AAG
  source 1..20: mol_type = other DNA
cctacctctacaaagctaaa

SEQ ID NO: 9653 - DNA, 20 bp, synthetic construct
  misc_feature 1..20: note = Description of Artificial Sequence: Synthetic oligonucleotide
  misc_feature 1..20: note = Target: ANGPTL4; (-) strand; PAM type: NRG; PAM sequence: AAG
  source 1..20: mol_type = other DNA
ctgtaggacctacctctaca

SEQ ID NO: 9654 - DNA, 20 bp, synthetic construct
  misc_feature 1..20: note = Description of Artificial Sequence: Synthetic oligonucleotide
  misc_feature 1..20: note = Target: ANGPTL4; (-) strand; PAM type: NRG; PAM sequence: AGG
  source 1..20: mol_type = other DNA
ctccctggcctggcagctgt

SEQ ID NO: 9655 - DNA, 20 bp, synthetic construct
  misc_feature 1..20: note = Description of Artificial Sequence: Synthetic oligonucleotide
  misc_feature 1..20: note = Target: ANGPTL4; (-) strand; PAM type: NRG; PAM sequence: TAG
  source 1..20: mol_type = other DNA
cctccctggcctggcagctg

SEQ ID NO: 9656 - DNA, 20 bp, synthetic construct
  misc_feature 1..20: note = Description of Artificial Sequence: Synthetic oligonucleotide
  misc_feature 1..20: note = Target: ANGPTL4; (-) strand; PAM type: NRG; PAM sequence: CAG
  source 1..20: mol_type = other DNA
ctctagcctccctggcctgg

SEQ ID NO: 9657 - DNA, 20 bp, synthetic construct
  misc_feature 1..20: note = Description of Artificial Sequence: Synthetic oligonucleotide
  misc_feature 1..20: note = Target: ANGPTL4; (-) strand; PAM type: NRG; PAM sequence: TGG
  source 1..20: mol_type = other DNA
agcctctagcctccctggcc

SEQ ID NO: 9658 - DNA, 20 bp, synthetic construct
  misc_feature 1..20: note = Description of Artificial Sequence: Synthetic oligonucleotide
  misc_feature 1..20: note = Target: ANGPTL4; (-) strand; PAM type: NRG; PAM sequence: TGG
  source 1..20: mol_type = other DNA
agggcagcctctagcctccc

SEQ ID NO: 9659 - DNA, 20 bp, synthetic construct
  misc_feature 1..20: note = Description of Artificial Sequence: Synthetic oligonucleotide
  misc_feature 1..20: note = Target: ANGPTL4; (-) strand; PAM type: NRG; PAM sequence: TAG
  source 1..20: mol_type = other DNA
aacctggagagggcagcctc

SEQ ID NO: 9660 - DNA, 20 bp, synthetic construct
  misc_feature 1..20: note = Description of Artificial Sequence: Synthetic oligonucleotide
  misc_feature 1..20: note = Target: ANGPTL4; (-) strand; PAM type: NRG; PAM sequence: CAG
  source 1..20: mol_type = other DNA
aacaaggaacctggagaggg

SEQ ID NO: 9661 - DNA, 20 bp, synthetic construct
  misc_feature 1..20: note = Description of Artificial Sequence: Synthetic oligonucleotide
  misc_feature 1..20: note = Target: ANGPTL4; (-) strand; PAM type: NRG; PAM sequence: GGG
  source 1..20: mol_type = other DNA
gcaaacaaggaacctggaga

SEQ ID NO: 9662 - DNA, 20 bp, synthetic construct
  misc_feature 1..20: note = Description of Artificial Sequence: Synthetic oligonucleotide
  misc_feature 1..20: note = Target: ANGPTL4; (-) strand; PAM type: NRG; PAM sequence: AGG
  source 1..20: mol_type = other DNA
ggcaaacaaggaacctggag

SEQ ID NO: 9663 - DNA, 20 bp, synthetic construct
  misc_feature 1..20: note = Description of Artificial Sequence: Synthetic oligonucleotide
  misc_feature 1..20: note = Target: ANGPTL4; (-) strand; PAM type: NRG; PAM sequence: GAG
  source 1..20: mol_type = other DNA
aggcaaacaaggaacctgga

SEQ ID NO: 9664 - DNA, 20 bp, synthetic construct
  misc_feature 1..20: note = Description of Artificial Sequence: Synthetic oligonucleotide
  misc_feature 1..20: note = Target: ANGPTL4; (-) strand; PAM type: NRG; PAM sequence: GAG
  source 1..20: mol_type = other DNA
acaggcaaacaaggaacctg

SEQ ID NO: 9665 - DNA, 20 bp, synthetic construct
  misc_feature 1..20: note = Description of Artificial Sequence: Synthetic oligonucleotide
  misc_feature 1..20: note = Target: ANGPTL4; (-) strand; PAM type: NRG; PAM sequence: TGG
  source 1..20: mol_type = other DNA
acacaggcaaacaaggaacc

SEQ ID NO: 9666 - DNA, 20 bp, synthetic construct
  misc_feature 1..20: note = Description of Artificial Sequence: Synthetic oligonucleotide
  misc_feature 1..20: note = Target: ANGPTL4; (-) strand; PAM type: NRG; PAM sequence: AGG
  source 1..20: mol_type = other DNA
gtacaggacacaggcaaaca

SEQ ID NO: 9667 - DNA, 20 bp, synthetic construct
  misc_feature 1..20: note = Description of Artificial Sequence: Synthetic oligonucleotide
  misc_feature 1..20: note = Target: ANGPTL4; (-) strand; PAM type: NRG; PAM sequence: AAG
  source 1..20: mol_type = other DNA
agtacaggacacaggcaaac

SEQ ID NO: 9668 - DNA, 20 bp, synthetic construct
  misc_feature 1..20: note = Description of Artificial Sequence: Synthetic oligonucleotide
  misc_feature 1..20: note = Target: ANGPTL4; (-) strand; PAM type: NRG; PAM sequence: AGG
  source 1..20: mol_type = other DNA
gcctgctcagtacaggacac

SEQ ID NO: 9669 - DNA, 20 bp, synthetic construct
  misc_feature 1..20: note = Description of Artificial Sequence: Synthetic oligonucleotide
  misc_feature 1..20: note = Target: ANGPTL4; (-) strand; PAM type: NRG; PAM sequence: CAG
  source 1..20: mol_type = other DNA
agcctgctcagtacaggaca

SEQ ID NO: 9670 - DNA, 20 bp, synthetic construct
  misc_feature 1..20: note = Description of Artificial Sequence: Synthetic oligonucleotide
  misc_feature 1..20: note = Target: ANGPTL4; (-) strand; PAM type: NRG; PAM sequence: AGG
  source 1..20: mol_type = other DNA
cctctaagcctgctcagtac

SEQ ID NO: 9671 - DNA, 20 bp, synthetic construct
  misc_feature 1..20: note = Description of Artificial Sequence: Synthetic oligonucleotide
  misc_feature 1..20: note = Target: ANGPTL4; (-) strand; PAM type: NRG; PAM sequence: CAG
  source 1..20: mol_type = other DNA
tcctctaagcctgctcagta

SEQ ID NO: 9672 - DNA, 20 bp, synthetic construct
  misc_feature 1..20: note = Description of Artificial Sequence: Synthetic oligonucleotide
  misc_feature 1..20: note = Target: ANGPTL4; (-) strand; PAM type: NRG; PAM sequence: CAG
  source 1..20: mol_type = other DNA
ggagatcctctaagcctgct

SEQ ID NO: 9673 - DNA, 20 bp, synthetic construct
  misc_feature 1..20: note = Description of Artificial Sequence: Synthetic oligonucleotide
  misc_feature 1..20: note = Target: ANGPTL4; (-) strand; PAM type: NRG; PAM sequence: AAG
  source 1..20: mol_type = other DNA
gggctcagaggagatcctct

SEQ ID NO: 9674 - DNA, 20 bp, synthetic construct
  misc_feature 1..20: note = Description of Artificial Sequence: Synthetic oligonucleotide
  misc_feature 1..20: note = Target: ANGPTL4; (-) strand; PAM type: NRG; PAM sequence: GAG
  source 1..20: mol_type = other DNA
cagtgacagtgggctcagag

SEQ ID NO: 9675 - DNA, 20 bp, synthetic construct
  misc_feature 1..20: note = Description of Artificial Sequence: Synthetic oligonucleotide
  misc_feature 1..20: note = Target: ANGPTL4; (-) strand; PAM type: NRG; PAM sequence: AGG
  source 1..20: mol_type = other DNA
tccagtgacagtgggctcag

SEQ ID NO: 9676 - DNA, 20 bp, synthetic construct
  misc_feature 1..20: note = Description of Artificial Sequence: Synthetic oligonucleotide
  misc_feature 1..20: note = Target: ANGPTL4; (-) strand; PAM type: NRG; PAM sequence: GAG
  source 1..20: mol_type = other DNA
ctccagtgacagtgggctca

SEQ ID NO: 9677 - DNA, 20 bp, synthetic construct
  misc_feature 1..20: note = Description of Artificial Sequence: Synthetic oligonucleotide
  misc_feature 1..20: note = Target: ANGPTL4; (-) strand; PAM type: NRG; PAM sequence: CAG
  source 1..20: mol_type = other DNA
agctccagtgacagtgggct

SEQ ID NO: 9678 - DNA, 20 bp, synthetic construct
  misc_feature 1..20: note = Description of Artificial Sequence: Synthetic oligonucleotide
  misc_feature 1..20: note = Target: ANGPTL4; (-) strand; PAM type: NRG; PAM sequence: GGG
  source 1..20: mol_type = other DNA
ccaccagctccagtgacagt

SEQ ID NO: 9679 - DNA, 20 bp, synthetic construct
  misc_feature 1..20: note = Description of Artificial Sequence: Synthetic oligonucleotide
  misc_feature 1..20: note = Target: ANGPTL4; (-) strand; PAM type: NRG; PAM sequence: TGG
  source 1..20: mol_type = other DNA
accaccagctccagtgacag

SEQ ID NO: 9680 - DNA, 20 bp, synthetic construct
  misc_feature 1..20: note = Description of Artificial Sequence: Synthetic oligonucleotide
  misc_feature 1..20: note = Target: ANGPTL4; (-) strand; PAM type: NRG; PAM sequence: CAG
  source 1..20: mol_type = other DNA
ctcaccaccagctccagtga

SEQ ID NO: 9681 - DNA, 20 bp, synthetic construct
  misc_feature 1..20: note = Description of Artificial Sequence: Synthetic oligonucleotide
  misc_feature 1..20: note = Target: ANGPTL4; (-) strand; PAM type: NRG; PAM sequence: CAG
  source 1..20: mol_type = other DNA
actggactcaccaccagctc

SEQ ID NO: 9682 - DNA, 20 bp, synthetic construct
  misc_feature 1..20: note = Description of Artificial Sequence: Synthetic oligonucleotide
  misc_feature 1..20: note = Target: ANGPTL4; (-) strand; PAM type: NRG; PAM sequence: CAG
  source 1..20: mol_type = other DNA
ctgcagactggactcaccac

SEQ ID NO: 9683 - DNA, 20 bp, synthetic construct
  misc_feature 1..20: note = Description of Artificial Sequence: Synthetic oligonucleotide
  misc_feature 1..20: note = Target: ANGPTL4; (-) strand; PAM type: NRG; PAM sequence: TGG
  source 1..20: mol_type = other DNA
gaaccccctctcctgcagac

SEQ ID NO: 9684 - DNA, 20 bp, synthetic construct
  misc_feature 1..20: note = Description of Artificial Sequence: Synthetic oligonucleotide
  misc_feature 1..20: note = Target: ANGPTL4; (-) strand; PAM type: NRG; PAM sequence: CAG
  source 1..20: mol_type = other DNA
tagaggaaccccctctcctg

SEQ ID NO: 9685 - DNA, 20 bp, synthetic construct
  misc_feature 1..20: note = Description of Artificial Sequence: Synthetic oligonucleotide
  misc_feature 1..20: note = Target: ANGPTL4; (-) strand; PAM type: NRG; PAM sequence: AGG
  source 1..20: mol_type = other DNA
aatgaagagggtgtggctag

SEQ ID NO: 9686 - DNA, 20 bp, synthetic construct
  misc_feature 1..20: note = Description of Artificial Sequence: Synthetic oligonucleotide
  misc_feature 1..20: note = Target: ANGPTL4; (-) strand; PAM type: NRG; PAM sequence: GAG
  source 1..20: mol_type = other DNA
aaatgaagagggtgtggcta

SEQ ID NO: 9687 - DNA, 20 bp, synthetic construct
  misc_feature 1..20: note = Description of Artificial Sequence: Synthetic oligonucleotide
  misc_feature 1..20: note = Target: ANGPTL4; (-) strand; PAM type: NRG; PAM sequence: TAG
  source 1..20: mol_type = other DNA
ggaaatgaagagggtgtggc

SEQ ID NO: 9688 - DNA, 20 bp, synthetic construct
  misc_feature 1..20: note = Description of Artificial Sequence: Synthetic oligonucleotide
  misc_feature 1..20: note = Target: ANGPTL4; (-) strand; PAM type: NRG; PAM sequence: TGG
  source 1..20: mol_type = other DNA
gcctggaaatgaagagggtg

SEQ ID NO: 9689 - DNA, 20 bp, synthetic construct
  misc_feature 1..20: note = Description of Artificial Sequence: Synthetic oligonucleotide
  misc_feature 1..20: note = Target: ANGPTL4; (-) strand; PAM type: NRG; PAM sequence: GGG
  source 1..20: mol_type = other DNA
gcagagcctggaaatgaaga

SEQ ID NO: 9690 - DNA, 20 bp, synthetic construct
  misc_feature 1..20: note = Description of Artificial Sequence: Synthetic oligonucleotide
  misc_feature 1..20: note = Target: ANGPTL4; (-) strand; PAM type: NRG; PAM sequence: AGG
  source 1..20: mol_type = other DNA
ggcagagcctggaaatgaag

SEQ ID NO: 9691 - DNA, 20 bp, synthetic construct
  misc_feature 1..20: note = Description of Artificial Sequence: Synthetic oligonucleotide
  misc_feature 1..20: note = Target: ANGPTL4; (-) strand; PAM type: NRG; PAM sequence: GAG
  source 1..20: mol_type = other DNA
tggcagagcctggaaatgaa

SEQ ID NO: 9692 - DNA, 20 bp, synthetic construct
  misc_feature 1..20: note = Description of Artificial Sequence: Synthetic oligonucleotide
  misc_feature 1..20: note = Target: ANGPTL4; (-) strand; PAM type: NRG; PAM sequence: AAG
  source 1..20: mol_type = other DNA
attggcagagcctggaaatg

SEQ ID NO: 9693 - DNA, 20 bp, synthetic construct
  misc_feature 1..20: note = Description of Artificial Sequence: Synthetic oligonucleotide
  misc_feature 1..20: note = Target: ANGPTL4; (-) strand; PAM type: NRG; PAM sequence: TGG
  source 1..20: mol_type = other DNA
agcccatcattggcagagcc

SEQ ID NO: 9694 - DNA, 20 bp, synthetic construct
  misc_feature 1..20: note = Description of Artificial Sequence: Synthetic oligonucleotide
  misc_feature 1..20: note = Target: ANGPTL4; (-) strand; PAM type: NRG; PAM sequence: GAG
  source 1..20: mol_type = other DNA
agatgagcccatcattggca

SEQ ID NO: 9695 - DNA, 20 bp, synthetic construct
  misc_feature 1..20: note = Description of Artificial Sequence: Synthetic oligonucleotide
  misc_feature 1..20: note = Target: ANGPTL4; (-) strand; PAM type: NRG; PAM sequence: CAG
  source 1..20: mol_type = other DNA
agagatgagcccatcattgg

SEQ ID NO: 9696 - DNA, 20 bp, synthetic construct
  misc_feature 1..20: note = Description of Artificial Sequence: Synthetic oligonucleotide
  misc_feature 1..20: note = Target: ANGPTL4; (-) strand; PAM type: NRG; PAM sequence: TGG
  source 1..20: mol_type = other DNA
tgaagagatgagcccatcat

SEQ ID NO: 9697 - DNA, 20 bp, synthetic construct
  misc_feature 1..20: note = Description of Artificial Sequence: Synthetic oligonucleotide
  misc_feature 1..20: note = Target: ANGPTL4; (-) strand; PAM type: NRG; PAM sequence: GAG
  source 1..20: mol_type = other DNA
aaggatgacattgaagagat

SEQ ID NO: 9698 - DNA, 20 bp, synthetic construct
  misc_feature 1..20: note = Description of Artificial Sequence: Synthetic oligonucleotide
  misc_feature 1..20: note = Target: ANGPTL4; (-) strand; PAM type: NRG; PAM sequence: GAG
  source 1..20: mol_type = other DNA
ggaaaaaggatgacattgaa

SEQ ID NO: 9699 - DNA, 20 bp, synthetic construct
  misc_feature 1..20: note = Description of Artificial Sequence: Synthetic oligonucleotide
  misc_feature 1..20: note = Target: ANGPTL4; (-) strand; PAM type: NRG; PAM sequence: AAG
  source 1..20: mol_type = other DNA
caggaaaaaggatgacattg

SEQ ID NO: 9700 - DNA, 20 bp, synthetic construct
  misc_feature 1..20: note = Description of Artificial Sequence: Synthetic oligonucleotide
  misc_feature 1..20: note = Target: ANGPTL4; (-) strand; PAM type: NRG; PAM sequence: AGG
  source 1..20: mol_type = other DNA
tcaaggtggctgcaggaaaa

SEQ ID NO: 9701 - DNA, 20 bp, synthetic construct
  misc_feature 1..20: note = Description of Artificial Sequence: Synthetic oligonucleotide
  misc_feature 1..20: note = Target: ANGPTL4; (-) strand; PAM type: NRG; PAM sequence: AAG
  source 1..20: mol_type = other DNA
gtcaaggtggctgcaggaaa

SEQ ID NO: 9702 - DNA, 20 bp, synthetic construct
  misc_feature 1..20: note = Description of Artificial Sequence: Synthetic oligonucleotide
  misc_feature 1..20: note = Target: ANGPTL4; (-) strand; PAM type: NRG; PAM sequence: AGG
  source 1..20: mol_type = other DNA
tttgaggtcaaggtggctgc

SEQ ID NO: 9703 - DNA, 20 bp, synthetic construct
  misc_feature 1..20: note = Description of Artificial Sequence: Synthetic oligonucleotide
  misc_feature 1..20: note = Target: ANGPTL4; (-) strand; PAM type: NRG; PAM sequence: CAG
  source 1..20: mol_type = other DNA
ctttgaggtcaaggtggctg

SEQ ID NO: 9704 - DNA, 20 bp, synthetic construct
  misc_feature 1..20: note = Description of Artificial Sequence: Synthetic oligonucleotide
  misc_feature 1..20: note = Target: ANGPTL4; (-) strand; PAM type: NRG; PAM sequence: TGG
  source 1..20: mol_type = other DNA
gaaatgctttgaggtcaagg

SEQ ID NO: 9705 - DNA, 20 bp, synthetic construct
  misc_feature 1..20: note = Description of Artificial Sequence: Synthetic oligonucleotide
  misc_feature 1..20: note = Target: ANGPTL4; (-) strand; PAM type: NRG; PAM sequence: AGG
  source 1..20: mol_type = other DNA
caggaaatgctttgaggtca

SEQ ID NO: 9706 - DNA, 20 bp, synthetic construct
  misc_feature 1..20: note = Description of Artificial Sequence: Synthetic oligonucleotide
  misc_feature 1..20: note = Target: ANGPTL4; (-) strand; PAM type: NRG; PAM sequence: AAG
  source 1..20: mol_type = other DNA
gcaggaaatgctttgaggtc

SEQ ID NO: 9707 - DNA, 20 bp, synthetic construct
  misc_feature 1..20: note = Description of Artificial Sequence: Synthetic oligonucleotide
  misc_feature 1..20: note = Target: ANGPTL4; (-) strand; PAM type: NRG; PAM sequence: AGG
  source 1..20: mol_type = other DNA
gaggggcaggaaatgctttg

SEQ ID NO: 9708 - DNA, 20 bp, synthetic construct
  misc_feature 1..20: note = Description of Artificial Sequence: Synthetic oligonucleotide
  misc_feature 1..20: note = Target: ANGPTL4; (-) strand; PAM type: NRG; PAM sequence: GAG
  source 1..20: mol_type = other DNA
ggaggggcaggaaatgcttt

SEQ ID NO: 9709 - DNA, 20 bp, synthetic construct
  misc_feature 1..20: note = Description of Artificial Sequence: Synthetic oligonucleotide
  misc_feature 1..20: note = Target: ANGPTL4; (-) strand; PAM type: NRG; PAM sequence: AGG
  source 1..20: mol_type = other DNA
gttccccaggttggaggggc

SEQ ID NO: 9710 - DNA, 20 bp, synthetic construct
  misc_feature 1..20: note = Description of Artificial Sequence: Synthetic oligonucleotide
  misc_feature 1..20: note = Target: ANGPTL4; (-) strand; PAM type: NRG; PAM sequence: CAG
  source 1..20: mol_type = other DNA
cgttccccaggttggagggg

SEQ ID NO: 9711 - DNA, 20 bp, synthetic construct
  misc_feature 1..20: note = Description of Artificial Sequence: Synthetic oligonucleotide
  misc_feature 1..20: note = Target: ANGPTL4; (-) strand; PAM type: NRG; PAM sequence: GGG
  source 1..20: mol_type = other DNA
tgtcgttccccaggttggag

SEQ ID NO: 9712 - DNA, 20 bp, synthetic construct
  misc_feature 1..20: note = Description of Artificial Sequence: Synthetic oligonucleotide
  misc_feature 1..20: note = Target: ANGPTL4; (-) strand; PAM type: NRG; PAM sequence: GGG
  source 1..20: mol_type = other DNA
ctgtcgttccccaggttgga

SEQ ID NO: 9713 - DNA, 20 bp, synthetic construct
  misc_feature 1..20: note = Description of Artificial Sequence: Synthetic oligonucleotide
  misc_feature 1..20: note = Target: ANGPTL4; (-) strand; PAM type: NRG; PAM sequence: AGG
  source 1..20: mol_type = other DNA
tctgtcgttccccaggttgg

SEQ ID NO: 9714 - DNA, 20 bp, synthetic construct
  misc_feature 1..20: note = Description of Artificial Sequence: Synthetic oligonucleotide
  misc_feature 1..20: note = Target: ANGPTL4; (-) strand; PAM type: NRG; PAM sequence: GAG
  source 1..20: mol_type = other DNA
ttctgtcgttccccaggttg

SEQ ID NO: 9715 - DNA, 20 bp, synthetic construct
  misc_feature 1..20: note = Description of Artificial Sequence: Synthetic oligonucleotide
  misc_feature 1..20: note = Target: ANGPTL4; (-) strand; PAM type: NRG; PAM sequence: TGG
  source 1..20: mol_type = other DNA
ttttctgtcgttccccaggt

SEQ ID NO: 9716 - DNA, 20 bp, synthetic construct
  misc_feature 1..20: note = Description of Artificial Sequence: Synthetic oligonucleotide
  misc_feature 1..20: note = Target: ANGPTL4; (-) strand; PAM type: NRG; PAM sequence: AGG
  source 1..20: mol_type = other DNA
ttttttttctgtcgttcccc

SEQ ID NO: 9717 - DNA, 20 bp, synthetic construct
  misc_feature 1..20: note = Description of Artificial Sequence: Synthetic oligonucleotide
  misc_feature 1..20: note = Target: ANGPTL4; (-) strand; PAM type: NRG; PAM sequence: CAG
  source 1..20: mol_type = other DNA
tttttttttctgtcgttccc

SEQ ID NO: 9718 - DNA, 20 bp, synthetic construct
  misc_feature 1..20: note = Description of Artificial Sequence: Synthetic oligonucleotide
  misc_feature 1..20: note = Target: ANGPTL4; (-) strand; PAM type: NRG; PAM sequence: TGG
  source 1..20: mol_type = other DNA
gcgccaccgtgcccaggtgg

SEQ ID NO: 9719 - DNA, 20 bp, synthetic construct
  misc_feature 1..20: note = Description of Artificial Sequence: Synthetic oligonucleotide
  misc_feature 1..20: note = Target: ANGPTL4; (-) strand; PAM type: NRG; PAM sequence: TGG
  source 1..20: mol_type = other DNA
agtgcgccaccgtgcccagg

SEQ ID NO: 9720 - DNA, 20 bp, synthetic construct
  misc_feature 1..20: note = Description of Artificial Sequence: Synthetic oligonucleotide
  misc_feature 1..20: note = Target: ANGPTL4; (-) strand; PAM type: NRG; PAM sequence: AGG
  source 1..20: mol_type = other DNA
aggagtgcgccaccgtgccc

SEQ ID NO: 9721 - DNA, 20 bp, synthetic construct
  misc_feature 1..20: note = Description of Artificial Sequence: Synthetic oligonucleotide
  misc_feature 1..20: note = Target: ANGPTL4; (-) strand; PAM type: NRG; PAM sequence: CAG
  source 1..20: mol_type = other DNA
taggagtgcgccaccgtgcc

SEQ ID NO: 9722 - DNA, 20 bp, synthetic construct
  misc_feature 1..20: note = Description of Artificial Sequence: Synthetic oligonucleotide
  misc_feature 1..20: note = Target: ANGPTL4; (-) strand; PAM type: NRG; PAM sequence: GAG
  source 1..20: mol_type = other DNA
ccagagtgcggggagtgtag

SEQ ID NO: 9723 - DNA, 20 bp, synthetic construct
  misc_feature 1..20: note = Description of Artificial Sequence: Synthetic oligonucleotide
  misc_feature 1..20: note = Target: ANGPTL4; (-) strand; PAM type: NRG; PAM sequence: AGG
  source 1..20: mol_type = other DNA
tcccagagtgcggggagtgt

SEQ ID NO: 9724 - DNA, 20 bp, synthetic construct
  misc_feature 1..20: note = Description of Artificial Sequence: Synthetic oligonucleotide
  misc_feature 1..20: note = Target: ANGPTL4; (-) strand; PAM type: NRG; PAM sequence: TAG
  source 1..20: mol_type = other DNA
ctcccagagtgcggggagtg

SEQ ID NO: 9725 - DNA, 20 bp, synthetic construct
  misc_feature 1..20: note = Description of Artificial Sequence: Synthetic oligonucleotide
  misc_feature 1..20: note = Target: ANGPTL4; (-) strand; PAM type: NRG; PAM sequence: GAG
  source 1..20: mol_type = other DNA
tcagcctcccagagtgcggg

SEQ ID NO: 9726 - DNA, 20 bp, synthetic construct
  misc_feature 1..20: note = Description of Artificial Sequence: Synthetic oligonucleotide
  misc_feature 1..20: note = Target: ANGPTL4; (-) strand; PAM type: NRG; PAM sequence: GGG
  source 1..20: mol_type = other DNA
cctcagcctcccagagtgcg

SEQ ID NO: 9727 - DNA, 20 bp, synthetic construct
  misc_feature 1..20: note = Description of Artificial Sequence: Synthetic oligonucleotide
  misc_feature 1..20: note = Target: ANGPTL4; (-) strand; PAM type: NRG; PAM sequence: GGG
  source 1..20: mol_type = other DNA
acctcagcctcccagagtgc

SEQ ID NO: 9728 - DNA, 20 bp, synthetic construct
  misc_feature 1..20: note = Description of Artificial Sequence: Synthetic oligonucleotide
  misc_feature 1..20: note = Target: ANGPTL4; (-) strand; PAM type: NRG; PAM sequence: CGG
  source 1..20: mol_type = other DNA
cacctcagcctcccagagtg

SEQ ID NO: 9729 - DNA, 20 bp, synthetic construct
  misc_feature 1..20: note = Description of Artificial Sequence: Synthetic oligonucleotide
  misc_feature 1..20: note = Target: ANGPTL4; (-) strand; PAM type: NRG; PAM sequence: GAG
  source 1..20: mol_type = other DNA
ctacccacctcagcctccca

SEQ ID NO: 9730 - DNA, 20 bp, synthetic construct
  misc_feature 1..20: note = Description of Artificial Sequence: Synthetic oligonucleotide
  misc_feature 1..20: note = Target: ANGPTL4; (-) strand; PAM type: NRG; PAM sequence: CAG
  source 1..20: mol_type = other DNA
atctacccacctcagcctcc

SEQ ID NO: 9731 - DNA, 20 bp, synthetic construct
  misc_feature 1..20: note = Description of Artificial Sequence: Synthetic oligonucleotide
  misc_feature 1..20: note = Target: ANGPTL4; (-) strand; PAM type: NRG; PAM sequence: CAG
  source 1..20: mol_type = other DNA
accttgtgatctacccacct

SEQ ID NO: 9732 - DNA, 20 bp, synthetic construct
  misc_feature 1..20: note = Description of Artificial Sequence: Synthetic oligonucleotide
  misc_feature 1..20: note = Target: ANGPTL4; (-) strand; PAM type: NRG; PAM sequence: TGG
  source 1..20: mol_type = other DNA
tttcaccgtgtcagccagta

SEQ ID NO: 9733 - DNA, 20 bp, synthetic construct
  misc_feature 1..20: note = Description of Artificial Sequence: Synthetic oligonucleotide
  misc_feature 1..20: note = Target: ANGPTL4; (-) strand; PAM type: NRG; PAM sequence: CAG
  source 1..20: mol_type = other DNA
cggggtttcaccgtgtcagc

SEQ ID NO: 9734 - DNA, 20 bp, synthetic construct
  misc_feature 1..20: note = Description of Artificial Sequence: Synthetic oligonucleotide
  misc_feature 1..20: note = Target: ANGPTL4; (-) strand; PAM type: NRG; PAM sequence: CAG
  source 1..20: mol_type = other DNA
gagacggggtttcaccgtgt

SEQ ID NO: 9735 - DNA, 20 bp, synthetic construct
  misc_feature 1..20: note = Description of Artificial Sequence: Synthetic oligonucleotide
  misc_feature 1..20: note = Target: ANGPTL4; (-) strand; PAM type: NRG; PAM sequence: GGG
  source 1..20: mol_type = other DNA
ttgtatttttagtagagacg

SEQ ID NO: 9736 - DNA, 20 bp, synthetic construct
  misc_feature 1..20: note = Description of Artificial Sequence: Synthetic oligonucleotide
  misc_feature 1..20: note = Target: ANGPTL4; (-) strand; PAM type: NRG; PAM sequence: GGG
  source 1..20: mol_type = other DNA
tttgtatttttagtagagac

SEQ ID NO: 9737 - DNA, 20 bp, synthetic construct
  misc_feature 1..20: note = Description of Artificial Sequence: Synthetic oligonucleotide
  misc_feature 1..20: note = Target: ANGPTL4; (-) strand; PAM type: NRG; PAM sequence: CGG
  source 1..20: mol_type = other DNA
ttttgtatttttagtagaga

SEQ ID NO: 9738 - DNA, 20 bp, synthetic construct
  misc_feature 1..20: note = Description of Artificial Sequence: Synthetic oligonucleotide
  misc_feature 1..20: note = Target: ANGPTL4; (-) strand; PAM type: NRG; PAM sequence: GAG
  source 1..20: mol_type = other DNA
aattttttgtatttttagta

SEQ ID NO: 9739 - DNA, 20 bp, synthetic construct
  misc_feature 1..20: note = Description of Artificial Sequence: Synthetic oligonucleotide
  misc_feature 1..20: note = Target: ANGPTL4; (-) strand; PAM type: NRG; PAM sequence: TAG
  source 1..20: mol_type = other DNA
ctaattttttgtatttttag

SEQ ID NO: 9740 - DNA, 20 bp, synthetic construct
  misc_feature 1..20: note = Description of Artificial Sequence: Synthetic oligonucleotide
  misc_feature 1..20: note = Target: ANGPTL4; (-) strand; PAM type: NRG; PAM sequence: TAG
  source 1..20: mol_type = other DNA
tggctaattttttgtatttt

SEQ ID NO: 9741 - DNA, 20 bp, synthetic construct
  misc_feature 1..20: note = Description of Artificial Sequence: Synthetic oligonucleotide
  misc_feature 1..20: note = Target: ANGPTL4; (-) strand; PAM type: NRG; PAM sequence: TGG
  source 1..20: mol_type = other DNA
cgggcatgtgccaccatgcc

SEQ ID NO: 9742 - DNA, 20 bp, synthetic construct
  misc_feature 1..20: note = Description of Artificial Sequence: Synthetic oligonucleotide
  misc_feature 1..20: note = Target: ANGPTL4; (-) strand; PAM type: NRG; PAM sequence: GGG
  source 1..20: mol_type = other DNA
tcccgaatagctgggactac

SEQ ID NO: 9743 - DNA, 20 bp, synthetic construct
  misc_feature 1..20: note = Description of Artificial Sequence: Synthetic oligonucleotide
  misc_feature 1..20: note = Target: ANGPTL4; (-) strand; PAM type: NRG; PAM sequence: CGG
  source 1..20: mol_type = other DNA
ctcccgaatagctgggacta

SEQ ID NO: 9744 - DNA, 20 bp, synthetic construct
  misc_feature 1..20: note = Description of Artificial Sequence: Synthetic oligonucleotide
  misc_feature 1..20: note = Target: ANGPTL4; (-) strand; PAM type: NRG; PAM sequence: GGG
  source 1..20: mol_type = other DNA
ccttagcctcccgaatagct

SEQ ID NO: 9745 - DNA, 20 bp, synthetic construct
  misc_feature 1..20: note = Description of Artificial Sequence: Synthetic oligonucleotide
  misc_feature 1..20: note = Target: ANGPTL4; (-) strand; PAM type: NRG; PAM sequence: TGG
  source 1..20: mol_type = other DNA
gccttagcctcccgaatagc

SEQ ID NO: 9746 - DNA, 20 bp, synthetic construct
  misc_feature 1..20: note = Description of Artificial Sequence: Synthetic oligonucleotide
  misc_feature 1..20: note = Target: ANGPTL4; (-) strand; PAM type: NRG; PAM sequence: TAG
  source 1..20: mol_type = other DNA
tcctgccttagcctcccgaa

SEQ ID NO: 9747 - DNA, 20 bp, synthetic construct
  misc_feature 1..20: note = Description of Artificial Sequence: Synthetic oligonucleotide
  misc_feature 1..20: note = Target: ANGPTL4; (-) strand; PAM type: NRG; PAM sequence: TAG
  source 1..20: mol_type = other DNA
ttcaagtgattctcctgcct

SEQ ID NO: 9748 - DNA, 20 bp, synthetic construct
  misc_feature 1..20: note = Description of Artificial Sequence: Synthetic oligonucleotide
  misc_feature 1..20: note = Target: ANGPTL4; (-) strand; PAM type: NRG; PAM sequence: AAG
  source 1..20: mol_type = other DNA
aacctccgcctcccaggttc

SEQ ID NO: 9749 - DNA, 20 bp, synthetic construct
  misc_feature 1..20: note = Description of Artificial Sequence: Synthetic oligonucleotide
  misc_feature 1..20: note = Target: ANGPTL4; (-) strand; PAM type: NRG; PAM sequence: AGG
  source 1..20: mol_type = other DNA
cactgcaacctccgcctccc

SEQ ID NO: 9750 - DNA, 20 bp, synthetic construct
  misc_feature 1..20: note = Description of Artificial Sequence: Synthetic oligonucleotide
  misc_feature 1..20: note = Target: ANGPTL4; (-) strand; PAM type: NRG; PAM sequence: CAG
  source 1..20: mol_type = other DNA
tcactgcaacctccgcctcc

SEQ ID NO: 9751 - DNA, 20 bp, synthetic construct
  misc_feature 1..20: note = Description of Artificial Sequence: Synthetic oligonucleotide
  misc_feature 1..20: note = Target: ANGPTL4; (-) strand; PAM type: NRG; PAM sequence: CAG
  source 1..20: mol_type = other DNA
ggagtgcagtggtgcaatct

SEQ ID NO: 9752 - DNA, 20 bp, synthetic construct
  misc_feature 1..20: note = Description of Artificial Sequence: Synthetic oligonucleotide
  misc_feature 1..20: note = Target: ANGPTL4; (-) strand; PAM type: NRG; PAM sequence: TGG
  source 1..20: mol_type = other DNA
tcacccaggctggagtgcag

SEQ ID NO: 9753 - DNA, 20 bp, synthetic construct
  misc_feature 1..20: note = Description of Artificial Sequence: Synthetic oligonucleotide
  misc_feature 1..20: note = Target: ANGPTL4; (-) strand; PAM type: NRG; PAM sequence: CAG
  source 1..20: mol_type = other DNA
ctgtcacccaggctggagtg

SEQ ID NO: 9754 - DNA, 20 bp, synthetic construct
  misc_feature 1..20: note = Description of Artificial Sequence: Synthetic oligonucleotide
  misc_feature 1..20: note = Target: ANGPTL4; (-) strand; PAM type: NRG; PAM sequence: GAG
  source 1..20: mol_type = other DNA
ttgctctgtcacccaggctg

SEQ ID NO: 9755 - DNA, 20 bp, synthetic construct
  misc_feature 1..20: note = Description of Artificial Sequence: Synthetic oligonucleotide
  misc_feature 1..20: note = Target: ANGPTL4; (-) strand; PAM type: NRG; PAM sequence: TGG
  source 1..20: mol_type = other DNA
tcttgctctgtcacccaggc

SEQ ID NO: 9756 - DNA, 20 bp, synthetic construct
  misc_feature 1..20: note = Description of Artificial Sequence: Synthetic oligonucleotide
  misc_feature 1..20: note = Target: ANGPTL4; (-) strand; PAM type: NRG; PAM sequence: AGG
  source 1..20: mol_type = other DNA
agagtcttgctctgtcaccc

SEQ ID NO: 9757 - DNA, 20 bp, synthetic construct
  misc_feature 1..20: note = Description of Artificial Sequence: Synthetic oligonucleotide
  misc_feature 1..20: note = Target: ANGPTL4; (-) strand; PAM type: NRG; PAM sequence: CAG
  source 1..20: mol_type = other DNA
cagagtcttgctctgtcacc

SEQ ID NO: 9758 - DNA, 20 bp, synthetic construct
  misc_feature 1..20: note = Description of Artificial Sequence: Synthetic oligonucleotide
  misc_feature 1..20: note = Target: ANGPTL4; (-) strand; PAM type: NRG; PAM sequence: GAG
  source 1..20: mol_type = other DNA
tttctttcttttttgagaca

SEQ ID NO: 9759 - DNA, 20 bp, synthetic construct
  misc_feature 1..20: note = Description of Artificial Sequence: Synthetic oligonucleotide
  misc_feature 1..20: note = Target: ANGPTL4; (-) strand; PAM type: NRG; PAM sequence: CAG
  source 1..20: mol_type = other DNA
tttttctttcttttttgaga

SEQ ID NO: 9760 - DNA, 20 bp, synthetic construct
  misc_feature 1..20: note = Description of Artificial Sequence: Synthetic oligonucleotide
  misc_feature 1..20: note = Target: ANGPTL4; (-) strand; PAM type: NRG; PAM sequence: GAG
  source 1..20: mol_type = other DNA
tctttttttctttctttttt

SEQ ID NO: 9761 - DNA, 20 bp, synthetic construct
  misc_feature 1..20: note = Description of Artificial Sequence: Synthetic oligonucleotide
  misc_feature 1..20: note = Target: ANGPTL4; (-) strand; PAM type: NRG; PAM sequence: TGG
  source 1..20: mol_type = other DNA
cccttgttagtttcctgcca

SEQ ID NO: 9762 - DNA, 20 bp, synthetic construct
  misc_feature 1..20: note = Description of Artificial Sequence: Synthetic oligonucleotide
  misc_feature 1..20: note = Target: ANGPTL4; (-) strand; PAM type: NRG; PAM sequence: TAG
  source 1..20: mol_type = other DNA
ccagcttcctggccccttgt

SEQ ID NO: 9763 - DNA, 20 bp, synthetic construct
  misc_feature 1..20: note = Description of Artificial Sequence: Synthetic oligonucleotide
  misc_feature 1..20: note = Target: ANGPTL4; (-) strand; PAM type: NRG; PAM sequence: TGG
  source 1..20: mol_type = other DNA
aggttcacatcccagcttcc

SEQ ID NO: 9764 - DNA, 20 bp, synthetic construct
  misc_feature 1..20: note = Description of Artificial Sequence: Synthetic oligonucleotide
  misc_feature 1..20: note = Target: ANGPTL4; (-) strand; PAM type: NRG; PAM sequence: CAG
  source 1..20: mol_type = other DNA
acaggtccaggttcacatcc

SEQ ID NO: 9765 - DNA, 20 bp, synthetic construct
  misc_feature 1..20: note = Description of Artificial Sequence: Synthetic oligonucleotide
  misc_feature 1..20: note = Target: ANGPTL4; (-) strand; PAM type: NRG; PAM sequence: AGG
  source 1..20: mol_type = other DNA
ctctggagtttaacaggtcc

SEQ ID NO: 9766 - DNA, 20 bp, synthetic construct
  misc_feature 1..20: note = Description of Artificial Sequence: Synthetic oligonucleotide
  misc_feature 1..20: note = Target: ANGPTL4; (-) strand; PAM type: NRG; PAM sequence: CAG
  source 1..20: mol_type = other DNA
gctctggagtttaacaggtc

SEQ ID NO: 9767 - DNA, 20 bp, synthetic construct
  misc_feature 1..20: note = Description of Artificial Sequence: Synthetic oligonucleotide
  misc_feature 1..20: note = Target: ANGPTL4; (-) strand; PAM type: NRG; PAM sequence: AGG
  source 1..20: mol_type = other DNA
ctgcagctctggagtttaac

SEQ ID NO: 9768 - DNA, 20 bp, synthetic construct
  misc_feature 1..20: note = Description of Artificial Sequence: Synthetic oligonucleotide
  misc_feature 1..20: note = Target: ANGPTL4; (-) strand; PAM type: NRG; PAM sequence: CAG
  source 1..20: mol_type = other DNA
gctgcagctctggagtttaa

SEQ ID NO: 9769 - DNA, 20 bp, synthetic construct
  misc_feature 1..20: note = Description of Artificial Sequence: Synthetic oligonucleotide
  misc_feature 1..20: note = Target: ANGPTL4; (-) strand; PAM type: NRG; PAM sequence: GAG
  source 1..20: mol_type = other DNA
gatttacagctgcagctctg

SEQ ID NO: 9770 - DNA, 20 bp, synthetic construct
  misc_feature 1..20: note = Description of Artificial Sequence: Synthetic oligonucleotide
  misc_feature 1..20: note = Target: ANGPTL4; (-) strand; PAM type: NRG; PAM sequence: TGG
  source 1..20: mol_type = other DNA
gtgatttacagctgcagctc

SEQ ID NO: 9771 - DNA, 20 bp, synthetic construct
  misc_feature 1..20: note = Description of Artificial Sequence: Synthetic oligonucleotide
  misc_feature 1..20: note = Target: ANGPTL4; (-) strand; PAM type: NRG; PAM sequence: CAG
  source 1..20: mol_type = other DNA
agggatgtgatttacagctg

SEQ ID NO: 9772 - DNA, 20 bp, synthetic construct
  misc_feature 1..20: note = Description of Artificial Sequence: Synthetic oligonucleotide
  misc_feature 1..20: note = Target: ANGPTL4; (-) strand; PAM type: NRG; PAM sequence: CAG
  source 1..20: mol_type = other DNA
caggagagggatgtgattta

SEQ ID NO: 9773 - DNA, 20 bp, synthetic construct
  misc_feature 1..20: note = Description of Artificial Sequence: Synthetic oligonucleotide
  misc_feature 1..20: note = Target: ANGPTL4; (-) strand; PAM type: NRG; PAM sequence: GGG
  source 1..20: mol_type = other DNA
agctcctgtggtccaggaga

SEQ ID NO: 9774 - DNA, 20 bp, synthetic construct
  misc_feature 1..20: note = Description of Artificial Sequence: Synthetic oligonucleotide
  misc_feature 1..20: note = Target: ANGPTL4; (-) strand; PAM type: NRG; PAM sequence: AGG
  source 1..20: mol_type = other DNA
gagctcctgtggtccaggag

SEQ ID NO: 9775 - DNA, 20 bp, synthetic construct
  misc_feature 1..20: note = Description of Artificial Sequence: Synthetic oligonucleotide
  misc_feature 1..20: note = Target: ANGPTL4; (-) strand; PAM type: NRG; PAM sequence: GAG
  source 1..20: mol_type = other DNA
tgagctcctgtggtccagga

SEQ ID NO: 9776 - DNA, 20 bp, synthetic construct
  misc_feature 1..20: note = Description of Artificial Sequence: Synthetic oligonucleotide
  misc_feature 1..20: note = Target: ANGPTL4; (-) strand; PAM type: NRG; PAM sequence: GAG
  source 1..20: mol_type = other DNA
agtgagctcctgtggtccag

SEQ ID NO: 9777 - DNA, 20 bp, synthetic construct
  misc_feature 1..20: note = Description of Artificial Sequence: Synthetic oligonucleotide
  misc_feature 1..20: note = Target: ANGPTL4; (-) strand; PAM type: NRG; PAM sequence: AGG
  source 1..20: mol_type = other DNA
ccagtgagctcctgtggtcc

SEQ ID NO: 9778 - DNA, 20 bp, synthetic construct
  misc_feature 1..20: note = Description of Artificial Sequence: Synthetic oligonucleotide
  misc_feature 1..20: note = Target: ANGPTL4; (-) strand; PAM type: NRG; PAM sequence: CAG
  source 1..20: mol_type = other DNA
gccagtgagctcctgtggtc

SEQ ID NO: 9779 - DNA, 20 bp, synthetic construct
  misc_feature 1..20: note = Description of Artificial Sequence: Synthetic oligonucleotide
  misc_feature 1..20: note = Target: ANGPTL4; (-) strand; PAM type: NRG; PAM sequence: TGG
  source 1..20: mol_type = other DNA
ctggggccagtgagctcctg

SEQ ID NO: 9780 - DNA, 20 bp, synthetic construct
  misc_feature 1..20: note = Description of Artificial Sequence: Synthetic oligonucleotide
  misc_feature 1..20: note = Target: ANGPTL4; (-) strand; PAM type: NRG; PAM sequence: GAG
  source 1..20: mol_type = other DNA
atgcaggaactggggccagt

SEQ ID NO: 9781 - DNA, 20 bp, synthetic construct
  misc_feature 1..20: note = Description of Artificial Sequence: Synthetic oligonucleotide
  misc_feature 1..20: note = Target: ANGPTL4; (-) strand; PAM type: NRG; PAM sequence: CAG
  source 1..20: mol_type = other DNA
ccaaatgcaggaactggggc

SEQ ID NO: 9782 - DNA, 20 bp, synthetic construct
  misc_feature 1..20: note = Description of Artificial Sequence: Synthetic oligonucleotide
  misc_feature 1..20: note = Target: ANGPTL4; (-) strand; PAM type: NRG; PAM sequence: GGG
  source 1..20: mol_type = other DNA
ttttccaaatgcaggaactg

SEQ ID NO: 9783 - DNA, 20 bp, synthetic construct
  misc_feature 1..20: note = Description of Artificial Sequence: Synthetic oligonucleotide
  misc_feature 1..20: note = Target: ANGPTL4; (-) strand; PAM type: NRG; PAM sequence: GGG
  source 1..20: mol_type = other DNA
attttccaaatgcaggaact

SEQ ID NO: 9784 - DNA, 20 bp, synthetic construct
  misc_feature 1..20: note = Description of Artificial Sequence: Synthetic oligonucleotide
  misc_feature 1..20: note = Target: ANGPTL4; (-) strand; PAM type: NRG; PAM sequence: TGG
  source 1..20: mol_type = other DNA
cattttccaaatgcaggaac

SEQ ID NO: 9785 - DNA, 20 bp, synthetic construct
  misc_feature 1..20: note = Description of Artificial Sequence: Synthetic oligonucleotide
  misc_feature 1..20: note = Target: ANGPTL4; (-) strand; PAM type: NRG; PAM sequence: AGG
  source 1..20: mol_type = other DNA
catccccattttccaaatgc

SEQ ID NO: 9786 - DNA, 20 bp, synthetic construct
  misc_feature 1..20: note = Description of Artificial Sequence: Synthetic oligonucleotide
  misc_feature 1..20: note = Target: ANGPTL4; (-) strand; PAM type: NRG; PAM sequence: CAG
  source 1..20: mol_type = other DNA
ccatccccattttccaaatg

SEQ ID NO: 9787 - DNA, 20 bp, synthetic construct
  misc_feature 1..20: note = Description of Artificial Sequence: Synthetic oligonucleotide
  misc_feature 1..20: note = Target: ANGPTL4; (-) strand; PAM type: NRG; PAM sequence: GGG
  source 1..20: mol_type = other DNA
gatggtggcatggaggggtg

SEQ ID NO: 9788 - DNA, 20 bp, synthetic construct
  misc_feature 1..20: note = Description of Artificial Sequence: Synthetic oligonucleotide
  misc_feature 1..20: note = Target: ANGPTL4; (-) strand; PAM type: NRG; PAM sequence: GGG
  source 1..20: mol_type = other DNA
ggatggtggcatggaggggt

SEQ ID NO: 9789 - DNA, 20 bp, synthetic construct
  misc_feature 1..20: note = Description of Artificial Sequence: Synthetic oligonucleotide
  misc_feature 1..20: note = Target: ANGPTL4; (-) strand; PAM type: NRG; PAM sequence: TGG
  source 1..20: mol_type = other DNA
gggatggtggcatggagggg

SEQ ID NO: 9790 - DNA, 20 bp, synthetic construct
  misc_feature 1..20: note = Description of Artificial Sequence: Synthetic oligonucleotide
  misc_feature 1..20: note = Target: ANGPTL4; (-) strand; PAM type: NRG; PAM sequence: GGG
  source 1..20: mol_type = other DNA
gaagggatggtggcatggag

SEQ ID NO: 9791 - DNA, 20 bp, synthetic construct
  misc_feature 1..20: note = Description of Artificial Sequence: Synthetic oligonucleotide
  misc_feature 1..20: note = Target: ANGPTL4; (-) strand; PAM type: NRG; PAM sequence: GGG
  source 1..20: mol_type = other DNA
ggaagggatggtggcatgga

SEQ ID NO: 9792 - DNA, 20 bp, synthetic construct
  misc_feature 1..20: note = Description of Artificial Sequence: Synthetic oligonucleotide
  misc_feature 1..20: note = Target: ANGPTL4; (-) strand; PAM type: NRG; PAM sequence: AGG
  source 1..20: mol_type = other DNA
aggaagggatggtggcatgg

SEQ ID NO: 9793 - DNA, 20 bp, synthetic construct
  misc_feature 1..20: note = Description of Artificial Sequence: Synthetic oligonucleotide
  misc_feature 1..20: note = Target: ANGPTL4; (-) strand; PAM type: NRG; PAM sequence: GAG
  source 1..20: mol_type = other DNA
caggaagggatggtggcatg

SEQ ID NO: 9794 - DNA, 20 bp, synthetic construct
  misc_feature 1..20: note = Description of Artificial Sequence: Synthetic oligonucleotide
  misc_feature 1..20: note = Target: ANGPTL4; (-) strand; PAM type: NRG; PAM sequence: TGG
  source 1..20: mol_type = other DNA
gccaggaagggatggtggca

SEQ ID NO: 9795 - DNA, 20 bp, synthetic construct
  misc_feature 1..20: note = Description of Artificial Sequence: Synthetic oligonucleotide
  misc_feature 1..20: note = Target: ANGPTL4; (-) strand; PAM type: NRG; PAM sequence: TGG
  source 1..20: mol_type = other DNA
atgaggccaggaagggatgg

SEQ ID NO: 9796 - DNA, 20 bp, synthetic construct
  misc_feature 1..20: note = Description of Artificial Sequence: Synthetic oligonucleotide
  misc_feature 1..20: note = Target: ANGPTL4; (-) strand; PAM type: NRG; PAM sequence: TGG
  source 1..20: mol_type = other DNA
accatgaggccaggaaggga

SEQ ID NO: 9797 - DNA, 20 bp, synthetic construct
  misc_feature 1..20: note = Description of Artificial Sequence: Synthetic oligonucleotide
  misc_feature 1..20: note = Target: ANGPTL4; (-) strand; PAM type: NRG; PAM sequence: GGG
  source 1..20: mol_type = other DNA
ccacaccatgaggccaggaa

SEQ ID NO: 9798 - DNA, 20 bp, synthetic construct
  misc_feature 1..20: note = Description of Artificial Sequence: Synthetic oligonucleotide
  misc_feature 1..20: note = Target: ANGPTL4; (-) strand; PAM type: NRG; PAM sequence: AGG
  source 1..20: mol_type = other DNA
cccacaccatgaggccagga

SEQ ID NO: 9799 - DNA, 20 bp, synthetic construct
  misc_feature 1..20: note = Description of Artificial Sequence: Synthetic oligonucleotide
  misc_feature 1..20: note = Target: ANGPTL4; (-) strand; PAM type: NRG; PAM sequence: AAG
  source 1..20: mol_type = other DNA
ccccacaccatgaggccagg

SEQ ID NO: 9800 - DNA, 20 bp, synthetic construct
  misc_feature 1..20: note = Description of Artificial Sequence: Synthetic oligonucleotide
  misc_feature 1..20: note = Target: ANGPTL4; (-) strand; PAM type: NRG; PAM sequence: AGG
  source 1..20: mol_type = other DNA
cctccccacaccatgaggcc

SEQ ID NO: 9801 - DNA, 20 bp, synthetic construct
  misc_feature 1..20: note = Description of Artificial Sequence: Synthetic oligonucleotide
  misc_feature 1..20: note = Target: ANGPTL4; (-) strand; PAM type: NRG; PAM sequence: CAG
  source 1..20: mol_type = other DNA
ccctccccacaccatgaggc

SEQ ID NO: 9802 - DNA, 20 bp, synthetic construct
  misc_feature 1..20: note = Description of Artificial Sequence: Synthetic oligonucleotide
  misc_feature 1..20: note = Target: ANGPTL4; (-) strand; PAM type: NRG; PAM sequence: AGG
  source 1..20: mol_type = other DNA
caccccctccccacaccatg

SEQ ID NO: 9803 - DNA, 20 bp, synthetic construct
  misc_feature 1..20: note = Description of Artificial Sequence: Synthetic oligonucleotide
  misc_feature 1..20: note = Target: ANGPTL4; (-) strand; PAM type: NRG; PAM sequence: GAG
  source 1..20: mol_type = other DNA
ccaccccctccccacaccat

SEQ ID NO: 9804 - DNA, 20 bp, synthetic construct
  misc_feature 1..20: note = Description of Artificial Sequence: Synthetic oligonucleotide
  misc_feature 1..20: note = Target: ANGPTL4; (-) strand; PAM type: NRG; PAM sequence: CAG
  source 1..20: mol_type = other DNA
cagtcgcgaggcactggacc

SEQ ID NO: 9805 - DNA, 20 bp, synthetic construct
  misc_feature 1..20: note = Description of Artificial Sequence: Synthetic oligonucleotide
  misc_feature 1..20: note = Target: ANGPTL4; (-) strand; PAM type: NRG; PAM sequence: TGG
  source 1..20: mol_type = other DNA
ggattacagtcgcgaggcac

SEQ ID NO: 9806 - DNA, 20 bp, synthetic construct
  misc_feature 1..20: note = Description of Artificial Sequence: Synthetic oligonucleotide
  misc_feature 1..20: note = Target: ANGPTL4; (-) strand; PAM type: NRG; PAM sequence: AGG
  source 1..20: mol_type = other DNA
gagctgggattacagtcgcg

SEQ ID NO: 9807 - DNA, 20 bp, synthetic construct
  misc_feature 1..20: note = Description of Artificial Sequence: Synthetic oligonucleotide
  misc_feature 1..20: note = Target: ANGPTL4; (-) strand; PAM type: NRG; PAM sequence: GAG
  source 1..20: mol_type = other DNA
agagctgggattacagtcgc

SEQ ID NO: 9808 - DNA, 20 bp, synthetic construct
  misc_feature 1..20: note = Description of Artificial Sequence: Synthetic oligonucleotide
  misc_feature 1..20: note = Target: ANGPTL4; (-) strand; PAM type: NRG; PAM sequence: CAG
  source 1..20: mol_type = other DNA
ctcccaaagagctgggatta

SEQ ID NO: 9809 - DNA, 20 bp, synthetic construct
  misc_feature 1..20: note = Description of Artificial Sequence: Synthetic oligonucleotide
  misc_feature 1..20: note = Target: ANGPTL4; (-) strand; PAM type: NRG; PAM sequence: GGG
  source 1..20: mol_type = other DNA
cctcagcctcccaaagagct

SEQ ID NO: 9810 - DNA, 20 bp, synthetic construct
  misc_feature 1..20: note = Description of Artificial Sequence: Synthetic oligonucleotide
  misc_feature 1..20: note = Target: ANGPTL4; (-) strand; PAM type: NRG; PAM sequence: TGG
  source 1..20: mol_type = other DNA
gcctcagcctcccaaagagc

SEQ ID NO: 9811 - DNA, 20 bp, synthetic construct
  misc_feature 1..20: note = Description of Artificial Sequence: Synthetic oligonucleotide
  misc_feature 1..20: note = Target: ANGPTL4; (-) strand; PAM type: NRG; PAM sequence: GAG
  source 1..20: mol_type = other DNA
tccagcctcagcctcccaaa

SEQ ID NO: 9812 - DNA, 20 bp, synthetic construct
  misc_feature 1..20: note = Description of Artificial Sequence: Synthetic oligonucleotide
  misc_feature 1..20: note = Target: ANGPTL4; (-) strand; PAM type: NRG; PAM sequence: AAG
  source 1..20: mol_type = other DNA
cctccagcctcagcctccca

SEQ ID NO: 9813 - DNA, 20 bp, synthetic construct
  misc_feature 1..20: note = Description of Artificial Sequence: Synthetic oligonucleotide
  misc_feature 1..20: note = Target: ANGPTL4; (-) strand; PAM type: NRG; PAM sequence: CAG
  source 1..20: mol_type = other DNA
actccaaggtcctccagcct

SEQ ID NO: 9814 - DNA, 20 bp, synthetic construct
  misc_feature 1..20: note = Description of Artificial Sequence: Synthetic oligonucleotide
  misc_feature 1..20: note = Target: ANGPTL4; (-) strand; PAM type: NRG; PAM sequence: CAG
  source 1..20: mol_type = other DNA
tctcaaactccaaggtcctc

SEQ ID NO: 9815 - DNA, 20 bp, synthetic construct
  misc_feature 1..20: note = Description of Artificial Sequence: Synthetic oligonucleotide
  misc_feature 1..20: note = Target: ANGPTL4; (-) strand; PAM type: NRG; PAM sequence: AGG
  source 1..20: mol_type = other DNA
taggctggtctcaaactcca

SEQ ID NO: 9816 - DNA, 20 bp, synthetic construct
  misc_feature 1..20: note = Description of Artificial Sequence: Synthetic oligonucleotide
  misc_feature 1..20: note = Target: ANGPTL4; (-) strand; PAM type: NRG; PAM sequence: AAG
  source 1..20: mol_type = other DNA
gtaggctggtctcaaactcc

SEQ ID NO: 9817 - DNA, 20 bp, synthetic construct
  misc_feature 1..20: note = Description of Artificial Sequence: Synthetic oligonucleotide
  misc_feature 1..20: note = Target: ANGPTL4; (-) strand; PAM type: NRG; PAM sequence: TGG
  source 1..20: mol_type = other DNA
tcttgctgtgttgcgtaggc

SEQ ID NO: 9818 - DNA, 20 bp, synthetic construct
  misc_feature 1..20: note = Description of Artificial Sequence: Synthetic oligonucleotide
  misc_feature 1..20: note = Target: ANGPTL4; (-) strand; PAM type: NRG; PAM sequence: AGG
  source 1..20: mol_type = other DNA
gaggtcttgctgtgttgcgt

SEQ ID NO: 9819 - DNA, 20 bp, synthetic construct
  misc_feature 1..20: note = Description of Artificial Sequence: Synthetic oligonucleotide
  misc_feature 1..20: note = Target: ANGPTL4; (-) strand; PAM type: NRG; PAM sequence: TAG
  source 1..20: mol_type = other DNA
tgaggtcttgctgtgttgcg

SEQ ID NO: 9820 - DNA, 20 bp, synthetic construct
  misc_feature 1..20: note = Description of Artificial Sequence: Synthetic oligonucleotide
  misc_feature 1..20: note = Target: ANGPTL4; (-) strand; PAM type: NRG; PAM sequence: AGG
  source 1..20: mol_type = other DNA
aaaaatttatcgtagagatg

SEQ ID NO: 9821 - DNA, 20 bp, synthetic construct
  misc_feature 1..20: note = Description of Artificial Sequence: Synthetic oligonucleotide
  misc_feature 1..20: note = Target: ANGPTL4; (-) strand; PAM type: NRG; PAM sequence: GAG
  source 1..20: mol_type = other DNA
taaaaatttatcgtagagat

SEQ ID NO: 9822 - DNA, 20 bp, synthetic construct
  misc_feature 1..20: note = Description of Artificial Sequence: Synthetic oligonucleotide
  misc_feature 1..20: note = Target: ANGPTL4; (-) strand; PAM type: NRG; PAM sequence: GAG
  source 1..20: mol_type = other DNA
ctttttaaaaatttatcgta

SEQ ID NO: 9823 - DNA, 20 bp, synthetic construct
  misc_feature 1..20: note = Description of Artificial Sequence: Synthetic oligonucleotide
  misc_feature 1..20: note = Target: ANGPTL4; (-) strand; PAM type: NRG; PAM sequence: TAG
  source 1..20: mol_type = other DNA
gactttttaaaaatttatcg

SEQ ID NO: 9824 - DNA, 20 bp, synthetic construct
  misc_feature 1..20: note = Description of Artificial Sequence: Synthetic oligonucleotide
  misc_feature 1..20: note = Target: ANGPTL4; (-) strand; PAM type: NRG; PAM sequence: CGG
  source 1..20: mol_type = other DNA
taggcatgagccactgcacc

SEQ ID NO: 9825 - DNA, 20 bp, synthetic construct
  misc_feature 1..20: note = Description of Artificial Sequence: Synthetic oligonucleotide
  misc_feature 1..20: note = Target: ANGPTL4; (-) strand; PAM type: NRG; PAM sequence: GAG
  source 1..20: mol_type = other DNA
agtgctgggattataggcat

SEQ ID NO: 9826 - DNA, 20 bp, synthetic construct
  misc_feature 1..20: note = Description of Artificial Sequence: Synthetic oligonucleotide
  misc_feature 1..20: note = Target: ANGPTL4; (-) strand; PAM type: NRG; PAM sequence: AGG
  source 1..20: mol_type = other DNA
tcccaaagtgctgggattat

SEQ ID NO: 9827 - DNA, 20 bp, synthetic construct
  misc_feature 1..20: note = Description of Artificial Sequence: Synthetic oligonucleotide
  misc_feature 1..20: note = Target: ANGPTL4; (-) strand; PAM type: NRG; PAM sequence: TAG
  source 1..20: mol_type = other DNA
ctcccaaagtgctgggatta

SEQ ID NO: 9828 - DNA, 20 bp, synthetic construct
  misc_feature 1..20: note = Description of Artificial Sequence: Synthetic oligonucleotide
  misc_feature 1..20: note = Target: ANGPTL4; (-) strand; PAM type: NRG; PAM sequence: GGG
  source 1..20: mol_type = other DNA
ccttggcctcccaaagtgct

SEQ ID NO: 9829 - DNA, 20 bp, synthetic construct
  misc_feature 1..20: note = Description of Artificial Sequence: Synthetic oligonucleotide
  misc_feature 1..20: note = Target: ANGPTL4; (-) strand; PAM type: NRG; PAM sequence: TGG
  source 1..20: mol_type = other DNA
gccttggcctcccaaagtgc

SEQ ID NO: 9830 - DNA, 20 bp, synthetic construct
  misc_feature 1..20: note = Description of Artificial Sequence: Synthetic oligonucleotide
  misc_feature 1..20: note = Target: ANGPTL4; (-) strand; PAM type: NRG; PAM sequence: AAG
  source 1..20: mol_type = other DNA
ccacccgccttggcctccca

SEQ ID NO: 9831 - DNA, 20 bp, synthetic construct
  misc_feature 1..20: note = Description of Artificial Sequence: Synthetic oligonucleotide
  misc_feature 1..20: note = Target: ANGPTL4; (-) strand; PAM type: NRG; PAM sequence: TGG
  source 1..20: mol_type = other DNA
acctcatgatccacccgcct

SEQ ID NO: 9832 - DNA, 20 bp, synthetic construct
  misc_feature 1..20: note = Description of Artificial Sequence: Synthetic oligonucleotide
  misc_feature 1..20: note = Target: ANGPTL4; (-) strand; PAM type: NRG; PAM sequence: TGG
  source 1..20: mol_type = other DNA
tttcactatcttggccaggc

SEQ ID NO: 9833 - DNA, 20 bp, synthetic construct
  misc_feature 1..20: note = Description of Artificial Sequence: Synthetic oligonucleotide
  misc_feature 1..20: note = Target: ANGPTL4; (-) strand; PAM type: NRG; PAM sequence: AGG
  source 1..20: mol_type = other DNA
ggggtttcactatcttggcc

SEQ ID NO: 9834 - DNA, 20 bp, synthetic construct
  misc_feature 1..20: note = Description of Artificial Sequence: Synthetic oligonucleotide
  misc_feature 1..20: note = Target: ANGPTL4; (-) strand; PAM type: NRG; PAM sequence: CAG
  source 1..20: mol_type = other DNA
tggggtttcactatcttggc

SEQ ID NO: 9835 - DNA, 20 bp, synthetic construct
  misc_feature 1..20: note = Description of Artificial Sequence: Synthetic oligonucleotide
  misc_feature 1..20: note = Target: ANGPTL4; (-) strand; PAM type: NRG; PAM sequence: TGG
  source 1..20: mol_type = other DNA
gagatggggtttcactatct

SEQ ID NO: 9836 - DNA, 20 bp, synthetic construct
  misc_feature 1..20: note = Description of Artificial Sequence: Synthetic oligonucleotide
  misc_feature 1..20: note = Target: ANGPTL4; (-) strand; PAM type: NRG; PAM sequence: GGG
  source 1..20: mol_type = other DNA
ttgtatttttagtagagatg

SEQ ID NO: 9837 - DNA, 20 bp, synthetic construct
  misc_feature 1..20: note = Description of Artificial Sequence: Synthetic oligonucleotide
  misc_feature 1..20: note = Target: ANGPTL4; (-) strand; PAM type: NRG; PAM sequence: GGG
  source 1..20: mol_type = other DNA
tttgtatttttagtagagat

SEQ ID NO: 9838 - DNA, 20 bp, synthetic construct
  misc_feature 1..20: note = Description of Artificial Sequence: Synthetic oligonucleotide
  misc_feature 1..20: note = Target: ANGPTL4; (-) strand; PAM type: NRG; PAM sequence: TGG
  source 1..20: mol_type = other DNA
ttttgtatttttagtagaga

SEQ ID NO: 9839 - DNA, 20 bp, synthetic construct
  misc_feature 1..20: note = Description of Artificial Sequence: Synthetic oligonucleotide
  misc_feature 1..20: note = Target: ANGPTL4; (-) strand; PAM type: NRG; PAM sequence: GAG
  source 1..20: mol_type = other DNA
atttttttgtatttttagta

SEQ ID NO: 9840 - DNA, 20 bp, synthetic construct
  misc_feature 1..20: note = Description of Artificial Sequence: Synthetic oligonucleotide
  misc_feature 1..20: note = Target: ANGPTL4; (-) strand; PAM type: NRG; PAM sequence: TAG
  source 1..20: mol_type = other DNA
taatttttttgtatttttag

SEQ ID NO: 9841 - DNA, 20 bp, synthetic construct
  misc_feature 1..20: note = Description of Artificial Sequence: Synthetic oligonucleotide
  misc_feature 1..20: note = Target: ANGPTL4; (-) strand; PAM type: NRG; PAM sequence: TAG
  source 1..20: mol_type = other DNA
ggctaatttttttgtatttt

SEQ ID NO: 9842 - DNA, 20 bp, synthetic construct
  misc_feature 1..20: note = Description of Artificial Sequence: Synthetic oligonucleotide
  misc_feature 1..20: note = Target: ANGPTL4; (-) strand; PAM type: NRG; PAM sequence: TGG
  source 1..20: mol_type = other DNA
caggcgcccaccaccacacc

SEQ ID NO: 9843 - DNA, 20 bp, synthetic construct
  misc_feature 1..20: note = Description of Artificial Sequence: Synthetic oligonucleotide
  misc_feature 1..20: note = Target: ANGPTL4; (-) strand; PAM type: NRG; PAM sequence: AGG
  source 1..20: mol_type = other DNA
tctcaagtagctgggattac

SEQ ID NO: 9844 - DNA, 20 bp, synthetic construct
  misc_feature 1..20: note = Description of Artificial Sequence: Synthetic oligonucleotide
  misc_feature 1..20: note = Target: ANGPTL4; (-) strand; PAM type: NRG; PAM sequence: CAG
  source 1..20: mol_type = other DNA
ctctcaagtagctgggatta

SEQ ID NO: 9845 - DNA, 20 bp, synthetic construct
  misc_feature 1..20: note = Description of Artificial Sequence: Synthetic oligonucleotide
  misc_feature 1..20: note = Target: ANGPTL4; (-) strand; PAM type: NRG; PAM sequence: GGG
  source 1..20: mol_type = other DNA
ccttagcctctcaagtagct

SEQ ID NO: 9846 - DNA, 20 bp, synthetic construct
  misc_feature 1..20: note = Description of Artificial Sequence: Synthetic oligonucleotide
  misc_feature 1..20: note = Target: ANGPTL4; (-) strand; PAM type: NRG; PAM sequence: TGG
  source 1..20: mol_type = other DNA
gccttagcctctcaagtagc

SEQ ID NO: 9847 - DNA, 20 bp, synthetic construct
  misc_feature 1..20: note = Description of Artificial Sequence: Synthetic oligonucleotide
  misc_feature 1..20: note = Target: ANGPTL4; (-) strand; PAM type: NRG; PAM sequence: TAG
  source 1..20: mol_type = other DNA
ctctgccttagcctctcaag

SEQ ID NO: 9848 - DNA, 20 bp, synthetic construct
  misc_feature 1..20: note = Description of Artificial Sequence: Synthetic oligonucleotide
  misc_feature 1..20: note = Target: ANGPTL4; (-) strand; PAM type: NRG; PAM sequence: AAG
  source 1..20: mol_type = other DNA
attctctgccttagcctctc

SEQ ID NO: 9849 - DNA, 20 bp, synthetic construct
  misc_feature 1..20: note = Description of Artificial Sequence: Synthetic oligonucleotide
  misc_feature 1..20: note = Target: ANGPTL4; (-) strand; PAM type: NRG; PAM sequence: TAG
  source 1..20: mol_type = other DNA
gtccaagcaattctctgcct

SEQ ID NO: 9850 - DNA, 20 bp, synthetic construct
  misc_feature 1..20: note = Description of Artificial Sequence: Synthetic oligonucleotide
  misc_feature 1..20: note = Target: ANGPTL4; (-) strand; PAM type: NRG; PAM sequence: AAG
  source 1..20: mol_type = other DNA
accctctgcctcccgagtcc

SEQ ID NO: 9851 - DNA, 20 bp, synthetic construct
  misc_feature 1..20: note = Description of Artificial Sequence: Synthetic oligonucleotide
  misc_feature 1..20: note = Target: ANGPTL4; (-) strand; PAM type: NRG; PAM sequence: GAG
  source 1..20: mol_type = other DNA
cactgcaccctctgcctccc

SEQ ID NO: 9852 - DNA, 20 bp, synthetic construct
  misc_feature 1..20: note = Description of Artificial Sequence: Synthetic oligonucleotide
  misc_feature 1..20: note = Target: ANGPTL4; (-) strand; PAM type: NRG; PAM sequence: CGG
  source 1..20: mol_type = other DNA
ggagtgcagtggcatgatct

SEQ ID NO: 9853 - DNA, 20 bp, synthetic construct
  misc_feature 1..20: note = Description of Artificial Sequence: Synthetic oligonucleotide
  misc_feature 1..20: note = Target: ANGPTL4; (-) strand; PAM type: NRG; PAM sequence: TGG
  source 1..20: mol_type = other DNA
ttgcccaggctggagtgcag

SEQ ID NO: 9854 - DNA, 20 bp, synthetic construct
  misc_feature 1..20: note = Description of Artificial Sequence: Synthetic oligonucleotide
  misc_feature 1..20: note = Target: ANGPTL4; (-) strand; PAM type: NRG; PAM sequence: CAG
  source 1..20: mol_type = other DNA
ctgttgcccaggctggagtg

SEQ ID NO: 9855 - DNA, 20 bp, synthetic construct
  misc_feature 1..20: note = Description of Artificial Sequence: Synthetic oligonucleotide
  misc_feature 1..20: note = Target: ANGPTL4; (-) strand; PAM type: NRG; PAM sequence: GAG
  source 1..20: mol_type = other DNA
tcactctgttgcccaggctg

SEQ ID NO: 9856 - DNA, 20 bp, synthetic construct
  misc_feature 1..20: note = Description of Artificial Sequence: Synthetic oligonucleotide
  misc_feature 1..20: note = Target: ANGPTL4; (-) strand; PAM type: NRG; PAM sequence: TGG
  source 1..20: mol_type = other DNA
tctcactctgttgcccaggc

SEQ ID NO: 9857 - DNA, 20 bp, synthetic construct
  misc_feature 1..20: note = Description of Artificial Sequence: Synthetic oligonucleotide
  misc_feature 1..20: note = Target: ANGPTL4; (-) strand; PAM type: NRG; PAM sequence: AGG
  source 1..20: mol_type = other DNA
agggtctcactctgttgccc

SEQ ID NO: 9858 - DNA, 20 bp, synthetic construct
  misc_feature 1..20: note = Description of Artificial Sequence: Synthetic oligonucleotide
  misc_feature 1..20: note = Target: ANGPTL4; (-) strand; PAM type: NRG; PAM sequence: CAG
  source 1..20: mol_type = other DNA
cagggtctcactctgttgcc

SEQ ID NO: 9859 - DNA, 20 bp, synthetic construct
  misc_feature 1..20: note = Description of Artificial Sequence: Synthetic oligonucleotide
  misc_feature 1..20: note = Target: ANGPTL4; (-) strand; PAM type: NRG; PAM sequence: GGG
  source 1..20: mol_type = other DNA
ttttttttttttttgaggca

SEQ ID NO: 9860 - DNA, 20 bp, synthetic construct
  misc_feature 1..20: note = Description of Artificial Sequence: Synthetic oligonucleotide
  misc_feature 1..20: note = Target: ANGPTL4; (-) strand; PAM type: NRG; PAM sequence: AGG
  source 1..20: mol_type = other DNA
tttttttttttttttgaggc

SEQ ID NO: 9861 - DNA, 20 bp, synthetic construct
  misc_feature 1..20: note = Description of Artificial Sequence: Synthetic oligonucleotide
  misc_feature 1..20: note = Target: ANGPTL4; (-) strand; PAM type: NRG; PAM sequence: CAG
  source 1..20: mol_type = other DNA
ctttttttttttttttgagg

SEQ ID NO: 9862 - DNA, 20 bp, synthetic construct
  misc_feature 1..20: note = Description of Artificial Sequence: Synthetic oligonucleotide
  misc_feature 1..20: note = Target: ANGPTL4; (-) strand; PAM type: NRG; PAM sequence: AGG
  source 1..20: mol_type = other DNA
attctttttttttttttttg

SEQ ID NO: 9863 - DNA, 20 bp, synthetic construct
  misc_feature 1..20: note = Description of Artificial Sequence: Synthetic oligonucleotide
  misc_feature 1..20: note = Target: ANGPTL4; (-) strand; PAM type: NRG; PAM sequence: GAG
  source 1..20: mol_type = other DNA
gattcttttttttttttttt

SEQ ID NO: 9864 - DNA, 20 bp, synthetic construct
  misc_feature 1..20: note = Description of Artificial Sequence: Synthetic oligonucleotide
  misc_feature 1..20: note = Target: ANGPTL4; (-) strand; PAM type: NRG; PAM sequence: CAG
  source 1..20: mol_type = other DNA
ctccctccctctatcatcct

SEQ ID NO: 9865 - DNA, 20 bp, synthetic construct
  misc_feature 1..20: note = Description of Artificial Sequence: Synthetic oligonucleotide
  misc_feature 1..20: note = Target: ANGPTL4; (-) strand; PAM type: NRG; PAM sequence: TGG
  source 1..20: mol_type = other DNA
cccatcaaacccagaggaca

SEQ ID NO: 9866 - DNA, 20 bp, synthetic construct
  misc_feature 1..20: note = Description of Artificial Sequence: Synthetic oligonucleotide
  misc_feature 1..20: note = Target: ANGPTL4; (-) strand; PAM type: NRG; PAM sequence: AGG
  source 1..20: mol_type = other DNA
ctccctcccatcaaacccag

SEQ ID NO: 9867 - DNA, 20 bp, synthetic construct
  misc_feature 1..20: note = Description of Artificial Sequence: Synthetic oligonucleotide
  misc_feature 1..20: note = Target: ANGPTL4; (-) strand; PAM type: NRG; PAM sequence: GAG
  source 1..20: mol_type = other DNA
cctccctcccatcaaaccca

SEQ ID NO: 9868 - DNA, 20 bp, synthetic construct
  misc_feature 1..20: note = Description of Artificial Sequence: Synthetic oligonucleotide
  misc_feature 1..20: note = Target: ANGPTL4; (-) strand; PAM type: NRG; PAM sequence: CAG
  source 1..20: mol_type = other DNA
tccctccctcccatcaaacc

SEQ ID NO: 9869 - DNA, 20 bp, synthetic construct
  misc_feature 1..20: note = Description of Artificial Sequence: Synthetic oligonucleotide
  misc_feature 1..20: note = Target: ANGPTL4; (-) strand; PAM type: NRG; PAM sequence: CGG
  source 1..20: mol_type = other DNA
acccgacccagaagcctagc

SEQ ID NO: 9870 - DNA, 20 bp, synthetic construct
  misc_feature 1..20: note = Description of Artificial Sequence: Synthetic oligonucleotide
  misc_feature 1..20: note = Target: ANGPTL4; (-) strand; PAM type: NRG; PAM sequence: TAG
  source 1..20: mol_type = other DNA
ccccacccgacccagaagcc

SEQ ID NO: 9871 - DNA, 20 bp, synthetic construct
  misc_feature 1..20: note = Description of Artificial Sequence: Synthetic oligonucleotide
  misc_feature 1..20: note = Target: ANGPTL4; (-) strand; PAM type: NRG; PAM sequence: AAG
  source 1..20: mol_type = other DNA
caagtccccacccgacccag

SEQ ID NO: 9872 - DNA, 20 bp, synthetic construct
  misc_feature 1..20: note = Description of Artificial Sequence: Synthetic oligonucleotide
  misc_feature 1..20: note = Target: ANGPTL4; (-) strand; PAM type: NRG; PAM sequence: CAG
  source 1..20: mol_type = other DNA
gttcaagtccccacccgacc

SEQ ID NO: 9873 - DNA, 20 bp, synthetic construct
  misc_feature 1..20: note = Description of Artificial Sequence: Synthetic oligonucleotide
  misc_feature 1..20: note = Target: ANGPTL4; (-) strand; PAM type: NRG; PAM sequence: AAG
  source 1..20: mol_type = other DNA
ttagctagacagaaaagttc

SEQ ID NO: 9874 - DNA, 20 bp, synthetic construct
  misc_feature 1..20: note = Description of Artificial Sequence: Synthetic oligonucleotide
  misc_feature 1..20: note = Target: ANGPTL4; (-) strand; PAM type: NRG; PAM sequence: AAG
  source 1..20: mol_type = other DNA
aatcctttagctagacagaa

SEQ ID NO: 9875 - DNA, 20 bp, synthetic construct
  misc_feature 1..20: note = Description of Artificial Sequence: Synthetic oligonucleotide
  misc_feature 1..20: note = Target: ANGPTL4; (-) strand; PAM type: NRG; PAM sequence: CAG
  source 1..20: mol_type = other DNA
tttacaatcctttagctaga

SEQ ID NO: 9876 - DNA, 20 bp, synthetic construct
  misc_feature 1..20: note = Description of Artificial Sequence: Synthetic oligonucleotide
  misc_feature 1..20: note = Target: ANGPTL4; (-) strand; PAM type: NRG; PAM sequence: TAG
  source 1..20: mol_type = other DNA
tacgtttacaatcctttagc

SEQ ID NO: 9877 - DNA, 20 bp, synthetic construct
  misc_feature 1..20: note = Description of Artificial Sequence: Synthetic oligonucleotide
  misc_feature 1..20: note = Target: ANGPTL4; (-) strand; PAM type: NRG; PAM sequence: TAG
  source 1..20: mol_type = other DNA
ttggtacgtttacaatcctt

SEQ ID NO: 9878 - DNA, 20 bp, synthetic construct
  misc_feature 1..20: note = Description of Artificial Sequence: Synthetic oligonucleotide
  misc_feature 1..20: note = Target: ANGPTL4; (-) strand; PAM type: NRG; PAM sequence: TGG
  source 1..20: mol_type = other DNA
gctagacacagagtgctgat

SEQ ID NO: 9879 - DNA, 20 bp, synthetic construct
  misc_feature 1..20: note = Description of Artificial Sequence: Synthetic oligonucleotide
  misc_feature 1..20: note = Target: ANGPTL4; (-) strand; PAM type: NRG; PAM sequence: GAG
  source 1..20: mol_type = other DNA
caatcctttagctagacaca

SEQ ID NO: 9880 - DNA, 20 bp, synthetic construct
  misc_feature 1..20: note = Description of Artificial Sequence: Synthetic oligonucleotide
  misc_feature 1..20: note = Target: ANGPTL4; (-) strand; PAM type: NRG; PAM sequence: CAG
  source 1..20: mol_type = other DNA
tacaatcctttagctagaca

SEQ ID NO: 9881 - DNA, 20 bp, synthetic construct
  misc_feature 1..20: note = Description of Artificial Sequence: Synthetic oligonucleotide
  misc_feature 1..20: note = Target: ANGPTL4; (-) strand; PAM type: NRG; PAM sequence: TAG
  source 1..20: mol_type = other DNA
tgcatttacaatcctttagc

SEQ ID NO: 9882 - DNA, 20 bp, synthetic construct
  misc_feature 1..20: note = Description of Artificial Sequence: Synthetic oligonucleotide
  misc_feature 1..20: note = Target: ANGPTL4; (-) strand; PAM type: NRG; PAM sequence: TAG
  source 1..20: mol_type = other DNA
ttggtgcatttacaatcctt

SEQ ID NO: 9883 - DNA, 20 bp, synthetic construct
  misc_feature 1..20: note = Description of Artificial Sequence: Synthetic oligonucleotide
  misc_feature 1..20: note = Target: ANGPTL4; (-) strand; PAM type: NRG; PAM sequence: TGG
  source 1..20: mol_type = other DNA
gctagacacagagtgctgat

SEQ ID NO: 9884 - DNA, 20 bp, synthetic construct
  misc_feature 1..20: note = Description of Artificial Sequence: Synthetic oligonucleotide
  misc_feature 1..20: note = Target: ANGPTL4; (-) strand; PAM type: NRG; PAM sequence: GAG
  source 1..20: mol_type = other DNA
caaacctttagctagacaca

SEQ ID NO: 9885 - DNA, 20 bp, synthetic construct
  misc_feature 1..20: note = Description of Artificial Sequence: Synthetic oligonucleotide
  misc_feature 1..20: note = Target: ANGPTL4; (-) strand; PAM type: NRG; PAM sequence: CAG
  source 1..20: mol_type = other DNA
tacaaacctttagctagaca

SEQ ID NO: 9886 - DNA, 20 bp, synthetic construct
  misc_feature 1..20: note = Description of Artificial Sequence: Synthetic oligonucleotide
  misc_feature 1..20: note = Target: ANGPTL4; (-) strand; PAM type: NRG; PAM sequence: TAG
  source 1..20: mol_type = other DNA
tgcatttacaaacctttagc

SEQ ID NO: 9887 - DNA, 20 bp, synthetic construct
  misc_feature 1..20: note = Description of Artificial Sequence: Synthetic oligonucleotide
  misc_feature 1..20: note = Target: ANGPTL4; (-) strand; PAM type: NRG; PAM sequence: TAG
  source 1..20: mol_type = other DNA
ttggtgcatttacaaacctt

SEQ ID NO: 9888 - DNA, 20 bp, synthetic construct
  misc_feature 1..20: note = Description of Artificial Sequence: Synthetic oligonucleotide
  misc_feature 1..20: note = Target: ANGPTL4; (-) strand; PAM type: NRG; PAM sequence: TGG
  source 1..20: mol_type = other DNA
gctagacacagagcgctgat

SEQ ID NO: 9889 - DNA, 20 bp, synthetic construct
  misc_feature 1..20: note = Description of Artificial Sequence: Synthetic oligonucleotide
  misc_feature 1..20: note = Target: ANGPTL4; (-) strand; PAM type: NRG; PAM sequence: GAG
  source 1..20: mol_type = other DNA
tacctgattagctagacaca

SEQ ID NO: 9890 - DNA, 20 bp, synthetic construct
  misc_feature 1..20: note = Description of Artificial Sequence: Synthetic oligonucleotide
  misc_feature 1..20: note = Target: ANGPTL4; (-) strand; PAM type: NRG; PAM sequence: CAG
  source 1..20: mol_type = other DNA
cctacctgattagctagaca

SEQ ID NO: 9891 - DNA, 20 bp, synthetic construct
  misc_feature 1..20: note = Description of Artificial Sequence: Synthetic oligonucleotide
  misc_feature 1..20: note = Target: ANGPTL4; (-) strand; PAM type: NRG; PAM sequence: TAG
  source 1..20: mol_type = other DNA
aagtcccctacctgattagc

SEQ ID NO: 9892 - DNA, 20 bp, synthetic construct
  misc_feature 1..20: note = Description of Artificial Sequence: Synthetic oligonucleotide
  misc_feature 1..20: note = Target: ANGPTL4; (-) strand; PAM type: NRG; PAM sequence: TAG
  source 1..20: mol_type = other DNA
ctccaagtcccctacctgat

SEQ ID NO: 9893 - DNA, 20 bp, synthetic construct
  misc_feature 1..20: note = Description of Artificial Sequence: Synthetic oligonucleotide
  misc_feature 1..20: note = Target: ANGPTL4; (+) strand; PAM type: NRG; PAM sequence: AAG
  source 1..20: mol_type = other DNA
agagtcttgctctgtcaccc

SEQ ID NO: 9894 - DNA, 20 bp, synthetic construct
  misc_feature 1..20: note = Description of Artificial Sequence: Synthetic oligonucleotide
  misc_feature 1..20: note = Target: ANGPTL4; (+) strand; PAM type: NRG; PAM sequence: TGG
  source 1..20: mol_type = other DNA
tcttgctctgtcacccaagc

SEQ ID NO: 9895 - DNA, 20 bp, synthetic construct
  misc_feature 1..20: note = Description of Artificial Sequence: Synthetic oligonucleotide
  misc_feature 1..20: note = Target: ANGPTL4; (+) strand; PAM type: NRG; PAM sequence: GAG
  source 1..20: mol_type = other DNA
ttgctctgtcacccaagctg

SEQ ID NO: 9896 - DNA, 20 bp, synthetic construct
  misc_feature 1..20: note = Description of Artificial Sequence: Synthetic oligonucleotide
  misc_feature 1..20: note = Target: ANGPTL4; (+) strand; PAM type: NRG; PAM sequence: TGG
  source 1..20: mol_type = other DNA
tcacccaagctggagtgcaa

SEQ ID NO: 9897 - DNA, 20 bp, synthetic construct
  misc_feature 1..20: note = Description of Artificial Sequence: Synthetic oligonucleotide
  misc_feature 1..20: note = Target: ANGPTL4; (+) strand; PAM type: NRG; PAM sequence: CAG
  source 1..20: mol_type = other DNA
ggtacgatctccgcttactg

SEQ ID NO: 9898 - DNA, 20 bp, synthetic construct
  misc_feature 1..20: note = Description of Artificial Sequence: Synthetic oligonucleotide
  misc_feature 1..20: note = Target: ANGPTL4; (+) strand; PAM type: NRG; PAM sequence: TGG
  source 1..20: mol_type = other DNA
ttactgcagcctccacctcc

SEQ ID NO: 9899 - DNA, 20 bp, synthetic construct
  misc_feature 1..20: note = Description of Artificial Sequence: Synthetic oligonucleotide
  misc_feature 1..20: note = Target: ANGPTL4; (+) strand; PAM type: NRG; PAM sequence: GGG
  source 1..20: mol_type = other DNA
tactgcagcctccacctcct

SEQ ID NO: 9900 - DNA, 20 bp, synthetic construct
  misc_feature 1..20: note = Description of Artificial Sequence: Synthetic oligonucleotide
  misc_feature 1..20: note = Target: ANGPTL4; (+) strand; PAM type: NRG; PAM sequence: AAG
  source 1..20: mol_type = other DNA
agcctccacctcctgggttc

SEQ ID NO: 9901 - DNA, 20 bp, synthetic construct
  misc_feature 1..20: note = Description of Artificial Sequence: Synthetic oligonucleotide
  misc_feature 1..20: note = Target: ANGPTL4; (+) strand; PAM type: NRG; PAM sequence: CAG
  source 1..20: mol_type = other DNA
ttcaagcgaatctcccacct

SEQ ID NO: 9902 - DNA, 20 bp, synthetic construct
  misc_feature 1..20: note = Description of Artificial Sequence: Synthetic oligonucleotide
  misc_feature 1..20: note = Target: ANGPTL4; (+) strand; PAM type: NRG; PAM sequence: TAG
  source 1..20: mol_type = other DNA
tcccacctcagcctcacaaa

SEQ ID NO: 9903 - DNA, 20 bp, synthetic construct
  misc_feature 1..20: note = Description of Artificial Sequence: Synthetic oligonucleotide
  misc_feature 1..20: note = Target: ANGPTL4; (+) strand; PAM type: NRG; PAM sequence: GAG
  source 1..20: mol_type = other DNA
cctcagcctcacaaatagct

SEQ ID NO: 9904 - DNA, 20 bp, synthetic construct
  misc_feature 1..20: note = Description of Artificial Sequence: Synthetic oligonucleotide
  misc_feature 1..20: note = Target: ANGPTL4; (+) strand; PAM type: NRG; PAM sequence: CGG
  source 1..20: mol_type = other DNA
ctcacaaatagctgagatta

SEQ ID NO: 9905 - DNA, 20 bp, synthetic construct
  misc_feature 1..20: note = Description of Artificial Sequence: Synthetic oligonucleotide
  misc_feature 1..20: note = Target: ANGPTL4; (+) strand; PAM type: NRG; PAM sequence: TAG
  source 1..20: mol_type = other DNA
cctgctaatttctgtatttt

SEQ ID NO: 9906 - DNA, 20 bp, synthetic construct
  misc_feature 1..20: note = Description of Artificial Sequence: Synthetic oligonucleotide
  misc_feature 1..20: note = Target: ANGPTL4; (+) strand; PAM type: NRG; PAM sequence: TAG
  source 1..20: mol_type = other DNA
gctaatttctgtatttttag

SEQ ID NO: 9907 - DNA, 20 bp, synthetic construct
  misc_feature 1..20: note = Description of Artificial Sequence: Synthetic oligonucleotide
  misc_feature 1..20: note = Target: ANGPTL4; (+) strand; PAM type: NRG; PAM sequence: GAG
  source 1..20: mol_type = other DNA
taatttctgtatttttagta

SEQ ID NO: 9908 - DNA, 20 bp, synthetic construct
  misc_feature 1..20: note = Description of Artificial Sequence: Synthetic oligonucleotide
  misc_feature 1..20: note = Target: ANGPTL4; (+) strand; PAM type: NRG; PAM sequence: TGG
  source 1..20: mol_type = other DNA
ttctgtatttttagtagaga

SEQ ID NO: 9909 - DNA, 20 bp, synthetic construct
  misc_feature 1..20: note = Description of Artificial Sequence: Synthetic oligonucleotide
  misc_feature 1..20: note = Target: ANGPTL4; (+) strand; PAM type: NRG; PAM sequence: GGG
  source 1..20: mol_type = other DNA
tctgtatttttagtagagat

SEQ ID NO: 9910 - DNA, 20 bp, synthetic construct
  misc_feature 1..20: note = Description of Artificial Sequence: Synthetic oligonucleotide
  misc_feature 1..20: note = Target: ANGPTL4; (+) strand; PAM type: NRG; PAM sequence: GGG
  source 1..20: mol_type = other DNA
ctgtatttttagtagagatg

SEQ ID NO: 9911 - DNA, 20 bp, synthetic construct
  misc_feature 1..20: note = Description of Artificial Sequence: Synthetic oligonucleotide
  misc_feature 1..20: note = Target: ANGPTL4; (+) strand; PAM type: NRG; PAM sequence: TGG
  source 1..20: mol_type = other DNA
gagatggggtttcaccatgc

SEQ ID NO: 9912 - DNA, 20 bp, synthetic construct
  misc_feature 1..20: note = Description of Artificial Sequence: Synthetic oligonucleotide
  misc_feature 1..20: note = Target: ANGPTL4; (+) strand; PAM type: NRG; PAM sequence: CAG
  source 1..20: mol_type = other DNA
tggggtttcaccatgctggc

SEQ ID NO: 9913 - DNA, 20 bp, synthetic construct
  misc_feature 1..20: note = Description of Artificial Sequence: Synthetic oligonucleotide
  misc_feature 1..20: note = Target: ANGPTL4; (+) strand; PAM type: NRG; PAM sequence: AGG
  source 1..20: mol_type = other DNA
ggggtttcaccatgctggcc

SEQ ID NO: 9914 - DNA, 20 bp, synthetic construct
  misc_feature 1..20: note = Description of Artificial Sequence: Synthetic oligonucleotide
  misc_feature 1..20: note = Target: ANGPTL4; (+) strand; PAM type: NRG; PAM sequence: TGG
  source 1..20: mol_type = other DNA
tttcaccatgctggccaggc

SEQ ID NO: 9915 - DNA, 20 bp, synthetic construct
  misc_feature 1..20: note = Description of Artificial Sequence: Synthetic oligonucleotide
  misc_feature 1..20: note = Target: ANGPTL4; (+) strand; PAM type: NRG; PAM sequence: CAG
  source 1..20: mol_type = other DNA
ccaggctggtctcgaactcc

SEQ ID NO: 9916 - DNA, 20 bp, synthetic construct
  misc_feature 1..20: note = Description of Artificial Sequence: Synthetic oligonucleotide
  misc_feature 1..20: note = Target: ANGPTL4; (+) strand; PAM type: NRG; PAM sequence: AAG
  source 1..20: mol_type = other DNA
ggtctcgaactcccagactc

SEQ ID NO: 9917 - DNA, 20 bp, synthetic construct
  misc_feature 1..20: note = Description of Artificial Sequence: Synthetic oligonucleotide
  misc_feature 1..20: note = Target: ANGPTL4; (+) strand; PAM type: NRG; PAM sequence: CAG
  source 1..20: mol_type = other DNA
ctcaagtgatccacccacct

SEQ ID NO: 9918 - DNA, 20 bp, synthetic construct
  misc_feature 1..20: note = Description of Artificial Sequence: Synthetic oligonucleotide
  misc_feature 1..20: note = Target: ANGPTL4; (+) strand; PAM type: NRG; PAM sequence: AAG
  source 1..20: mol_type = other DNA
ccacccacctcagcctccca

SEQ ID NO: 9919 - DNA, 20 bp, synthetic construct
  misc_feature 1..20: note = Description of Artificial Sequence: Synthetic oligonucleotide
  misc_feature 1..20: note = Target: ANGPTL4; (+) strand; PAM type: NRG; PAM sequence: TAG
  source 1..20: mol_type = other DNA
acctcagcctcccaaagtgc

SEQ ID NO: 9920 - DNA, 20 bp, synthetic construct
  misc_feature 1..20: note = Description of Artificial Sequence: Synthetic oligonucleotide
  misc_feature 1..20: note = Target: ANGPTL4; (+) strand; PAM type: NRG; PAM sequence: AGG
  source 1..20: mol_type = other DNA
cctcagcctcccaaagtgct

SEQ ID NO: 9921 - DNA, 20 bp, synthetic construct
  misc_feature 1..20: note = Description of Artificial Sequence: Synthetic oligonucleotide
  misc_feature 1..20: note = Target: ANGPTL4; (+) strand; PAM type: NRG; PAM sequence: CAG
  source 1..20: mol_type = other DNA
ctcccaaagtgctaggatta

SEQ ID NO: 9922 - DNA, 20 bp, synthetic construct
  misc_feature 1..20: note = Description of Artificial Sequence: Synthetic oligonucleotide
  misc_feature 1..20: note = Target: ANGPTL4; (+) strand; PAM type: NRG; PAM sequence: AGG
  source 1..20: mol_type = other DNA
tcccaaagtgctaggattac

SEQ ID NO: 9923 - DNA, 20 bp, synthetic construct
  misc_feature 1..20: note = Description of Artificial Sequence: Synthetic oligonucleotide
  misc_feature 1..20: note = Target: ANGPTL4; (+) strand; PAM type: NRG; PAM sequence: GAG
  source 1..20: mol_type = other DNA
agtgctaggattacaggtgt

SEQ ID NO: 9924 - DNA, 20 bp, synthetic construct
  misc_feature 1..20: note = Description of Artificial Sequence: Synthetic oligonucleotide
  misc_feature 1..20: note = Target: ANGPTL4; (+) strand; PAM type: NRG; PAM sequence: CGG
  source 1..20: mol_type = other DNA
acaggtgtgagccaccatgc

SEQ ID NO: 9925 - DNA, 20 bp, synthetic construct
  misc_feature 1..20: note = Description of Artificial Sequence: Synthetic oligonucleotide
  misc_feature 1..20: note = Target: ANGPTL4; (+) strand; PAM type: NRG; PAM sequence: GGG
  source 1..20: mol_type = other DNA
caggtgtgagccaccatgcc

SEQ ID NO: 9926 - DNA, 20 bp, synthetic construct
  misc_feature 1..20: note = Description of Artificial Sequence: Synthetic oligonucleotide
  misc_feature 1..20: note = Target: ANGPTL4; (+) strand; PAM type: NRG; PAM sequence: CAG
  source 1..20: mol_type = other DNA
tgagccaccatgccgggccc

SEQ ID NO: 9927 - DNA, 20 bp, synthetic construct
  misc_feature 1..20: note = Description of Artificial Sequence: Synthetic oligonucleotide
  misc_feature 1..20: note = Target: ANGPTL4; (+) strand; PAM type: NRG; PAM sequence: GAG
  source 1..20: mol_type = other DNA
gctaattttttttttttttt

SEQ ID NO: 9928 - DNA, 20 bp, synthetic construct
  misc_feature 1..20: note = Description of Artificial Sequence: Synthetic oligonucleotide
  misc_feature 1..20: note = Target: ANGPTL4; (+) strand; PAM type: NRG; PAM sequence: CAG
  source 1..20: mol_type = other DNA
atttttttttttttttgaga

SEQ ID NO: 9929 - DNA, 20 bp, synthetic construct
  misc_feature 1..20: note = Description of Artificial Sequence: Synthetic oligonucleotide
  misc_feature 1..20: note = Target: ANGPTL4; (+) strand; PAM type: NRG; PAM sequence: GAG
  source 1..20: mol_type = other DNA
ttttttttttttttgagaca

SEQ ID NO: 9930 - DNA, 20 bp, synthetic construct
  misc_feature 1..20: note = Description of Artificial Sequence: Synthetic oligonucleotide
  misc_feature 1..20: note = Target: ANGPTL4; (+) strand; PAM type: NRG; PAM sequence: CAG
  source 1..20: mol_type = other DNA
cagagtctcgccctgttgcc

SEQ ID NO: 9931 - DNA, 20 bp, synthetic construct
  misc_feature 1..20: note = Description of Artificial Sequence: Synthetic oligonucleotide
  misc_feature 1..20: note = Target: ANGPTL4; (+) strand; PAM type: NRG; PAM sequence: AGG
  source 1..20: mol_type = other DNA
agagtctcgccctgttgccc

SEQ ID NO: 9932 - DNA, 20 bp, synthetic construct
  misc_feature 1..20: note = Description of Artificial Sequence: Synthetic oligonucleotide
  misc_feature 1..20: note = Target: ANGPTL4; (+) strand; PAM type: NRG; PAM sequence: TGG
  source 1..20: mol_type = other DNA
tctcgccctgttgcccaggc

SEQ ID NO: 9933 - DNA, 20 bp, synthetic construct
  misc_feature 1..20: note = Description of Artificial Sequence: Synthetic oligonucleotide
  misc_feature 1..20: note = Target: ANGPTL4; (+) strand; PAM type: NRG; PAM sequence: GAG
  source 1..20: mol_type = other DNA
tcgccctgttgcccaggctg

SEQ ID NO: 9934 - DNA, 20 bp, synthetic construct
  misc_feature 1..20: note = Description of Artificial Sequence: Synthetic oligonucleotide
  misc_feature 1..20: note = Target: ANGPTL4; (+) strand; PAM type: NRG; PAM sequence: CAG
  source 1..20: mol_type = other DNA
ctgttgcccaggctggagtg

SEQ ID NO: 9935 - DNA, 20 bp, synthetic construct
  misc_feature 1..20: note = Description of Artificial Sequence: Synthetic oligonucleotide
  misc_feature 1..20: note = Target: ANGPTL4; (+) strand; PAM type: NRG; PAM sequence: TGG
  source 1..20: mol_type = other DNA
ttgcccaggctggagtgcag

SEQ ID NO: 9936 - DNA, 20 bp, synthetic construct
  misc_feature 1..20: note = Description of Artificial Sequence: Synthetic oligonucleotide
  misc_feature 1..20: note = Target: ANGPTL4; (+) strand; PAM type: NRG; PAM sequence: CGG
  source 1..20: mol_type = other DNA
ttactgcaccctctgcctcc

SEQ ID NO: 9937 - DNA, 20 bp, synthetic construct
  misc_feature 1..20: note = Description of Artificial Sequence: Synthetic oligonucleotide
  misc_feature 1..20: note = Target: ANGPTL4; (+) strand; PAM type: NRG; PAM sequence: GGG
  source 1..20: mol_type = other DNA
tactgcaccctctgcctccc

SEQ ID NO: 9938 - DNA, 20 bp, synthetic construct
  misc_feature 1..20: note = Description of Artificial Sequence: Synthetic oligonucleotide
  misc_feature 1..20: note = Target: ANGPTL4; (+) strand; PAM type: NRG; PAM sequence: CAG
  source 1..20: mol_type = other DNA
accctctgcctcccgggttc

SEQ ID NO: 9939 - DNA, 20 bp, synthetic construct
  misc_feature 1..20: note = Description of Artificial Sequence: Synthetic oligonucleotide
  misc_feature 1..20: note = Target: ANGPTL4; (+) strand; PAM type: NRG; PAM sequence: CAG
  source 1..20: mol_type = other DNA
ttccagcgattctcctgccc

SEQ ID NO: 9940 - DNA, 20 bp, synthetic construct
  misc_feature 1..20: note = Description of Artificial Sequence: Synthetic oligonucleotide
  misc_feature 1..20: note = Target: ANGPTL4; (+) strand; PAM type: NRG; PAM sequence: GAG
  source 1..20: mol_type = other DNA
ttctcctgccccagcctccc

SEQ ID NO: 9941 - DNA, 20 bp, synthetic construct
  misc_feature 1..20: note = Description of Artificial Sequence: Synthetic oligonucleotide
  misc_feature 1..20: note = Target: ANGPTL4; (+) strand; PAM type: NRG; PAM sequence: TGG
  source 1..20: mol_type = other DNA
gccccagcctcccgagtaac

SEQ ID NO: 9942 - DNA, 20 bp, synthetic construct
  misc_feature 1..20: note = Description of Artificial Sequence: Synthetic oligonucleotide
  misc_feature 1..20: note = Target: ANGPTL4; (+) strand; PAM type: NRG; PAM sequence: GGG
  source 1..20: mol_type = other DNA
ccccagcctcccgagtaact

SEQ ID NO: 9943 - DNA, 20 bp, synthetic construct
  misc_feature 1..20: note = Description of Artificial Sequence: Synthetic oligonucleotide
  misc_feature 1..20: note = Target: ANGPTL4; (+) strand; PAM type: NRG; PAM sequence: CAG
  source 1..20: mol_type = other DNA
ctcccgagtaactgggatta

SEQ ID NO: 9944 - DNA, 20 bp, synthetic construct
  misc_feature 1..20: note = Description of Artificial Sequence: Synthetic oligonucleotide
  misc_feature 1..20: note = Target: ANGPTL4; (+) strand; PAM type: NRG; PAM sequence: AGG
  source 1..20: mol_type = other DNA
tcccgagtaactgggattac

SEQ ID NO: 9945 - DNA, 20 bp, synthetic construct
  misc_feature 1..20: note = Description of Artificial Sequence: Synthetic oligonucleotide
  misc_feature 1..20: note = Target: ANGPTL4; (+) strand; PAM type: NRG; PAM sequence: TGG
  source 1..20: mol_type = other DNA
caggcgcgcgcctccacgcc

SEQ ID NO: 9946 - DNA, 20 bp, synthetic construct
  misc_feature 1..20: note = Description of Artificial Sequence: Synthetic oligonucleotide
  misc_feature 1..20: note = Target: ANGPTL4; (+) strand; PAM type: NRG; PAM sequence: TAG
  source 1..20: mol_type = other DNA
ctggctaatttttacatttt

SEQ ID NO: 9947 - DNA, 20 bp, synthetic construct
  misc_feature 1..20: note = Description of Artificial Sequence: Synthetic oligonucleotide
  misc_feature 1..20: note = Target: ANGPTL4; (+) strand; PAM type: NRG; PAM sequence: TAG
  source 1..20: mol_type = other DNA
gctaatttttacatttttag

SEQ ID NO: 9948 - DNA, 20 bp, synthetic construct
  misc_feature 1..20: note = Description of Artificial Sequence: Synthetic oligonucleotide
  misc_feature 1..20: note = Target: ANGPTL4; (+) strand; PAM type: NRG; PAM sequence: GAG
  source 1..20: mol_type = other DNA
taatttttacatttttagta

SEQ ID NO: 9949 - DNA, 20 bp, synthetic construct
  misc_feature 1..20: note = Description of Artificial Sequence: Synthetic oligonucleotide
  misc_feature 1..20: note = Target: ANGPTL4; (+) strand; PAM type: NRG; PAM sequence: CGG
  source 1..20: mol_type = other DNA
tttacatttttagtagagac

SEQ ID NO: 9950 - DNA, 20 bp, synthetic construct
  misc_feature 1..20: note = Description of Artificial Sequence: Synthetic oligonucleotide
  misc_feature 1..20: note = Target: ANGPTL4; (+) strand; PAM type: NRG; PAM sequence: GGG
  source 1..20: mol_type = other DNA
ttacatttttagtagagacc

SEQ ID NO: 9951 - DNA, 20 bp, synthetic construct
  misc_feature 1..20: note = Description of Artificial Sequence: Synthetic oligonucleotide
  misc_feature 1..20: note = Target: ANGPTL4; (+) strand; PAM type: NRG; PAM sequence: TGG
  source 1..20: mol_type = other DNA
gagaccgggtttcaccatgt

SEQ ID NO: 9952 - DNA, 20 bp, synthetic construct
  misc_feature 1..20: note = Description of Artificial Sequence: Synthetic oligonucleotide
  misc_feature 1..20: note = Target: ANGPTL4; (+) strand; PAM type: NRG; PAM sequence: CAG
  source 1..20: mol_type = other DNA
ccgggtttcaccatgttggt

SEQ ID NO: 9953 - DNA, 20 bp, synthetic construct
  misc_feature 1..20: note = Description of Artificial Sequence: Synthetic oligonucleotide
  misc_feature 1..20: note = Target: ANGPTL4; (+) strand; PAM type: NRG; PAM sequence: AGG
  source 1..20: mol_type = other DNA
cgggtttcaccatgttggtc

SEQ ID NO: 9954 - DNA, 20 bp, synthetic construct
  misc_feature 1..20: note = Description of Artificial Sequence: Synthetic oligonucleotide
  misc_feature 1..20: note = Target: ANGPTL4; (+) strand; PAM type: NRG; PAM sequence: TGG
  source 1..20: mol_type = other DNA
tttcaccatgttggtcaggc

SEQ ID NO: 9955 - DNA, 20 bp, synthetic construct
  misc_feature 1..20: note = Description of Artificial Sequence: Synthetic oligonucleotide
  misc_feature 1..20: note = Target: ANGPTL4; (+) strand; PAM type: NRG; PAM sequence: TGG
  source 1..20: mol_type = other DNA
acctcacgatctgcccacct

SEQ ID NO: 9956 - DNA, 20 bp, synthetic construct
  misc_feature 1..20: note = Description of Artificial Sequence: Synthetic oligonucleotide
  misc_feature 1..20: note = Target: ANGPTL4; (+) strand; PAM type: NRG; PAM sequence: AAG
  source 1..20: mol_type = other DNA
ctgcccaccttggactccca

SEQ ID NO: 9957 - DNA, 20 bp, synthetic construct
  misc_feature 1..20: note = Description of Artificial Sequence: Synthetic oligonucleotide
  misc_feature 1..20: note = Target: ANGPTL4; (+) strand; PAM type: NRG; PAM sequence: TGG
  source 1..20: mol_type = other DNA
accttggactcccaaagtgc

SEQ ID NO: 9958 - DNA, 20 bp, synthetic construct
  misc_feature 1..20: note = Description of Artificial Sequence: Synthetic oligonucleotide
  misc_feature 1..20: note = Target: ANGPTL4; (+) strand; PAM type: NRG; PAM sequence: CAG
  source 1..20: mol_type = other DNA
ctcccaaagtgctggtatta

SEQ ID NO: 9959 - DNA, 20 bp, synthetic construct
  misc_feature 1..20: note = Description of Artificial Sequence: Synthetic oligonucleotide
  misc_feature 1..20: note = Target: ANGPTL4; (+) strand; PAM type: NRG; PAM sequence: AGG
  source 1..20: mol_type = other DNA
tcccaaagtgctggtattac

SEQ ID NO: 9960 - DNA, 20 bp, synthetic construct
  misc_feature 1..20: note = Description of Artificial Sequence: Synthetic oligonucleotide
  misc_feature 1..20: note = Target: ANGPTL4; (+) strand; PAM type: NRG; PAM sequence: GAG
  source 1..20: mol_type = other DNA
agtgctggtattacaggcat

SEQ ID NO: 9961 - DNA, 20 bp, synthetic construct
  misc_feature 1..20: note = Description of Artificial Sequence: Synthetic oligonucleotide
  misc_feature 1..20: note = Target: ANGPTL4; (+) strand; PAM type: NRG; PAM sequence: CAG
  source 1..20: mol_type = other DNA
caggcatgagccaccgtgcc

SEQ ID NO: 9962 - DNA, 20 bp, synthetic construct
  misc_feature 1..20: note = Description of Artificial Sequence: Synthetic oligonucleotide
  misc_feature 1..20: note = Target: ANGPTL4; (+) strand; PAM type: NRG; PAM sequence: TGG
  source 1..20: mol_type = other DNA
atgagccaccgtgcccagcc

SEQ ID NO: 9963 - DNA, 20 bp, synthetic construct
  misc_feature 1..20: note = Description of Artificial Sequence: Synthetic oligonucleotide
  misc_feature 1..20: note = Target: ANGPTL4; (+) strand; PAM type: NRG; PAM sequence: CAG
  source 1..20: mol_type = other DNA
caccgtgcccagcctggccc

SEQ ID NO: 9964 - DNA, 20 bp, synthetic construct
  misc_feature 1..20: note = Description of Artificial Sequence: Synthetic oligonucleotide
  misc_feature 1..20: note = Target: ANGPTL4; (+) strand; PAM type: NRG; PAM sequence: CAG
  source 1..20: mol_type = other DNA
aattttttaaattttttgta

SEQ ID NO: 9965 - DNA, 20 bp, synthetic construct
  misc_feature 1..20: note = Description of Artificial Sequence: Synthetic oligonucleotide
  misc_feature 1..20: note = Target: ANGPTL4; (+) strand; PAM type: NRG; PAM sequence: CAG
  source 1..20: mol_type = other DNA
ttttaaattttttgtacaga

SEQ ID NO: 9966 - DNA, 20 bp, synthetic construct
  misc_feature 1..20: note = Description of Artificial Sequence: Synthetic oligonucleotide
  misc_feature 1..20: note = Target: ANGPTL4; (+) strand; PAM type: NRG; PAM sequence: AGG
  source 1..20: mol_type = other DNA
tttaaattttttgtacagac

SEQ ID NO: 9967 - DNA, 20 bp, synthetic construct
  misc_feature 1..20: note = Description of Artificial Sequence: Synthetic oligonucleotide
  misc_feature 1..20: note = Target: ANGPTL4; (+) strand; PAM type: NRG; PAM sequence: GGG
  source 1..20: mol_type = other DNA
ttaaattttttgtacagaca

SEQ ID NO: 9968 - DNA, 20 bp, synthetic construct
  misc_feature 1..20: note = Description of Artificial Sequence: Synthetic oligonucleotide
  misc_feature 1..20: note = Target: ANGPTL4; (+) strand; PAM type: NRG; PAM sequence: TGG
  source 1..20: mol_type = other DNA
gttacccaatcttgaactcc

SEQ ID NO: 9969 - DNA, 20 bp, synthetic construct
  misc_feature 1..20: note = Description of Artificial Sequence: Synthetic oligonucleotide
  misc_feature 1..20: note = Target: ANGPTL4; (+) strand; PAM type: NRG; PAM sequence: GGG
  source 1..20: mol_type = other DNA
ttacccaatcttgaactcct

SEQ ID NO: 9970 - DNA, 20 bp, synthetic construct
  misc_feature 1..20: note = Description of Artificial Sequence: Synthetic oligonucleotide
  misc_feature 1..20: note = Target: ANGPTL4; (+) strand; PAM type: NRG; PAM sequence: AAG
  source 1..20: mol_type = other DNA
aatcttgaactcctgggctc

SEQ ID NO: 9971 - DNA, 20 bp, synthetic construct
  misc_feature 1..20: note = Description of Artificial Sequence: Synthetic oligonucleotide
  misc_feature 1..20: note = Target: ANGPTL4; (+) strand; PAM type: NRG; PAM sequence: CAG
  source 1..20: mol_type = other DNA
cttgaactcctgggctcaag

SEQ ID NO: 9972 - DNA, 20 bp, synthetic construct
  misc_feature 1..20: note = Description of Artificial Sequence: Synthetic oligonucleotide
  misc_feature 1..20: note = Target: ANGPTL4; (+) strand; PAM type: NRG; PAM sequence: TGG
  source 1..20: mol_type = other DNA
ctcaagcagtcctcccacct

SEQ ID NO: 9973 - DNA, 20 bp, synthetic construct
  misc_feature 1..20: note = Description of Artificial Sequence: Synthetic oligonucleotide
  misc_feature 1..20: note = Target: ANGPTL4; (+) strand; PAM type: NRG; PAM sequence: AAG
  source 1..20: mol_type = other DNA
cctcccaccttggcctccca

SEQ ID NO: 9974 - DNA, 20 bp, synthetic construct
  misc_feature 1..20: note = Description of Artificial Sequence: Synthetic oligonucleotide
  misc_feature 1..20: note = Target: ANGPTL4; (+) strand; PAM type: NRG; PAM sequence: TGG
  source 1..20: mol_type = other DNA
accttggcctcccaaagtac

SEQ ID NO: 9975 - DNA, 20 bp, synthetic construct
  misc_feature 1..20: note = Description of Artificial Sequence: Synthetic oligonucleotide
  misc_feature 1..20: note = Target: ANGPTL4; (+) strand; PAM type: NRG; PAM sequence: GGG
  source 1..20: mol_type = other DNA
ccttggcctcccaaagtact

SEQ ID NO: 9976 - DNA, 20 bp, synthetic construct
  misc_feature 1..20: note = Description of Artificial Sequence: Synthetic oligonucleotide
  misc_feature 1..20: note = Target: ANGPTL4; (+) strand; PAM type: NRG; PAM sequence: AAG
  source 1..20: mol_type = other DNA
tcccaaagtactgggattac

SEQ ID NO: 9977 - DNA, 20 bp, synthetic construct
  misc_feature 1..20: note = Description of Artificial Sequence: Synthetic oligonucleotide
  misc_feature 1..20: note = Target: ANGPTL4; (+) strand; PAM type: NRG; PAM sequence: GAG
  source 1..20: mol_type = other DNA
agtactgggattacaagcat

SEQ ID NO: 9978 - DNA, 20 bp, synthetic construct
  misc_feature 1..20: note = Description of Artificial Sequence: Synthetic oligonucleotide
  misc_feature 1..20: note = Target: ANGPTL4; (+) strand; PAM type: NRG; PAM sequence: TAG
  source 1..20: mol_type = other DNA
caagcatgagccaccttgcc

SEQ ID NO: 9979 - DNA, 20 bp, synthetic construct
  misc_feature 1..20: note = Description of Artificial Sequence: Synthetic oligonucleotide
  misc_feature 1..20: note = Target: ANGPTL4; (+) strand; PAM type: NRG; PAM sequence: TGG
  source 1..20: mol_type = other DNA
agccaccttgcctagcttaa

SEQ ID NO: 9980 - DNA, 20 bp, synthetic construct
  misc_feature 1..20: note = Description of Artificial Sequence: Synthetic oligonucleotide
  misc_feature 1..20: note = Target: ANGPTL4; (+) strand; PAM type: NRG; PAM sequence: TAG
  source 1..20: mol_type = other DNA
cttaatggcatttacatttg

SEQ ID NO: 9981 - DNA, 20 bp, synthetic construct
  misc_feature 1..20: note = Description of Artificial Sequence: Synthetic oligonucleotide
  misc_feature 1..20: note = Target: ANGPTL4; (+) strand; PAM type: NRG; PAM sequence: CAG
  source 1..20: mol_type = other DNA
ttgtagtgaaatacacataa

SEQ ID NO: 9982 - DNA, 20 bp, synthetic construct
  misc_feature 1..20: note = Description of Artificial Sequence: Synthetic oligonucleotide
  misc_feature 1..20: note = Target: ANGPTL4; (+) strand; PAM type: NRG; PAM sequence: AGG
  source 1..20: mol_type = other DNA
tgtagtgaaatacacataac

SEQ ID NO: 9983 - DNA, 20 bp, synthetic construct
  misc_feature 1..20: note = Description of Artificial Sequence: Synthetic oligonucleotide
  misc_feature 1..20: note = Target: ANGPTL4; (+) strand; PAM type: NRG; PAM sequence: TGG
  source 1..20: mol_type = other DNA
gtgaaatacacataacaggc

SEQ ID NO: 9984 - DNA, 20 bp, synthetic construct
  misc_feature 1..20: note = Description of Artificial Sequence: Synthetic oligonucleotide
  misc_feature 1..20: note = Target: ANGPTL4; (+) strand; PAM type: NRG; PAM sequence: GGG
  source 1..20: mol_type = other DNA
tgaaatacacataacaggct

SEQ ID NO: 9985 - DNA, 20 bp, synthetic construct
  misc_feature 1..20: note = Description of Artificial Sequence: Synthetic oligonucleotide
  misc_feature 1..20: note = Target: ANGPTL4; (+) strand; PAM type: NRG; PAM sequence: CAG
  source 1..20: mol_type = other DNA
tacacataacaggctgggcg

SEQ ID NO: 9986 - DNA, 20 bp, synthetic construct
  misc_feature 1..20: note = Description of Artificial Sequence: Synthetic oligonucleotide
  misc_feature 1..20: note = Target: ANGPTL4; (+) strand; PAM type: NRG; PAM sequence: TGG
  source 1..20: mol_type = other DNA
acataacaggctgggcgcag

SEQ ID NO: 9987 - DNA, 20 bp, synthetic construct
  misc_feature 1..20: note = Description of Artificial Sequence: Synthetic oligonucleotide
  misc_feature 1..20: note = Target: ANGPTL4; (+) strand; PAM type: NRG; PAM sequence: CAG
  source 1..20: mol_type = other DNA
gtggctcatacctgtaatcc

SEQ ID NO: 9988 - DNA, 20 bp, synthetic construct
  misc_feature 1..20: note = Description of Artificial Sequence: Synthetic oligonucleotide
  misc_feature 1..20: note = Target: ANGPTL4; (+) strand; PAM type: NRG; PAM sequence: TGG
  source 1..20: mol_type = other DNA
tacctgtaatcccagcactt

SEQ ID NO: 9989 - DNA, 20 bp, synthetic construct
  misc_feature 1..20: note = Description of Artificial Sequence: Synthetic oligonucleotide
  misc_feature 1..20: note = Target: ANGPTL4; (+) strand; PAM type: NRG; PAM sequence: GGG
  source 1..20: mol_type = other DNA
acctgtaatcccagcacttt

SEQ ID NO: 9990 - DNA, 20 bp, synthetic construct
  misc_feature 1..20: note = Description of Artificial Sequence: Synthetic oligonucleotide
  misc_feature 1..20: note = Target: ANGPTL4; (+) strand; PAM type: NRG; PAM sequence: GAG
  source 1..20: mol_type = other DNA
ctgtaatcccagcactttgg

SEQ ID NO: 9991 - DNA, 20 bp, synthetic construct
  misc_feature 1..20: note = Description of Artificial Sequence: Synthetic oligonucleotide
  misc_feature 1..20: note = Target: ANGPTL4; (+) strand; PAM type: NRG; PAM sequence: AGG
  source 1..20: mol_type = other DNA
tgtaatcccagcactttggg

SEQ ID NO: 9992 - DNA, 20 bp, synthetic construct
  misc_feature 1..20: note = Description of Artificial Sequence: Synthetic oligonucleotide
  misc_feature 1..20: note = Target: ANGPTL4; (+) strand; PAM type: NRG; PAM sequence: GAG
  source 1..20: mol_type = other DNA
tcccagcactttgggaggcc

SEQ ID NO: 9993 - DNA, 20 bp, synthetic construct
  misc_feature 1..20: note = Description of Artificial Sequence: Synthetic oligonucleotide
  misc_feature 1..20: note = Target: ANGPTL4; (+) strand; PAM type: NRG; PAM sequence: AGG
  source 1..20: mol_type = other DNA
cccagcactttgggaggccg

SEQ ID NO: 9994 - DNA, 20 bp, synthetic construct
  misc_feature 1..20: note = Description of Artificial Sequence: Synthetic oligonucleotide
  misc_feature 1..20: note = Target: ANGPTL4; (+) strand; PAM type: NRG; PAM sequence: TAG
  source 1..20: mol_type = other DNA
agcactttgggaggccgagg

SEQ ID NO: 9995 - DNA, 20 bp, synthetic construct
  misc_feature 1..20: note = Description of Artificial Sequence: Synthetic oligonucleotide
  misc_feature 1..20: note = Target: ANGPTL4; (+) strand; PAM type: NRG; PAM sequence: AGG
  source 1..20: mol_type = other DNA
gcactttgggaggccgaggt

SEQ ID NO: 9996 - DNA, 20 bp, synthetic construct
  misc_feature 1..20: note = Description of Artificial Sequence: Synthetic oligonucleotide
  misc_feature 1..20: note = Target: ANGPTL4; (+) strand; PAM type: NRG; PAM sequence: CGG
  source 1..20: mol_type = other DNA
ctttgggaggccgaggtagg

SEQ ID NO: 9997 - DNA, 20 bp, synthetic construct
  misc_feature 1..20: note = Description of Artificial Sequence: Synthetic oligonucleotide
  misc_feature 1..20: note = Target: ANGPTL4; (+) strand; PAM type: NRG; PAM sequence: GAG
  source 1..20: mol_type = other DNA
ccgaggtaggcggatcacct

SEQ ID NO: 9998 - DNA, 20 bp, synthetic construct
  misc_feature 1..20: note = Description of Artificial Sequence: Synthetic oligonucleotide
  misc_feature 1..20: note = Target: ANGPTL4; (+) strand; PAM type: NRG; PAM sequence: AGG
  source 1..20: mol_type = other DNA
cgaggtaggcggatcacctg

SEQ ID NO: 9999 - DNA, 20 bp, synthetic construct
  misc_feature 1..20: note = Description of Artificial Sequence: Synthetic oligonucleotide
  misc_feature 1..20: note = Target: ANGPTL4; (+) strand; PAM type: NRG; PAM sequence: CAG
  source 1..20: mol_type = other DNA
gtaggcggatcacctgaggt

SEQ ID NO: 10000 - DNA, 20 bp, synthetic construct
  misc_feature 1..20: note = Description of Artificial Sequence: Synthetic oligonucleotide
  misc_feature 1..20: note = Target: ANGPTL4; (+) strand; PAM type: NRG; PAM sequence: AGG
  source 1..20: mol_type = other DNA
taggcggatcacctgaggtc

SEQ ID NO: 10001 - DNA, 20 bp, synthetic construct
  misc_feature 1..20: note = Description of Artificial Sequence: Synthetic oligonucleotide
  misc_feature 1..20: note = Target: ANGPTL4; (+) strand; PAM type: NRG; PAM sequence: GAG
  source 1..20: mol_type = other DNA
ggcggatcacctgaggtcag

SEQ ID NO: 10002 - DNA, 20 bp, synthetic construct
  misc_feature 1..20: note = Description of Artificial Sequence: Synthetic oligonucleotide
  misc_feature 1..20: note = Target: ANGPTL4; (+) strand; PAM type: NRG; PAM sequence: TAG
  source 1..20: mol_type = other DNA
gatcacctgaggtcaggagt

SEQ ID NO: 10003 - DNA, 20 bp, synthetic construct
  misc_feature 1..20: note = Description of Artificial Sequence: Synthetic oligonucleotide
  misc_feature 1..20: note = Target: ANGPTL4; (+) strand; PAM type: NRG; PAM sequence: GAG
  source 1..20: mol_type = other DNA
tcacctgaggtcaggagtta

SEQ ID NO: 10004 - DNA, 20 bp, synthetic construct
  misc_feature 1..20: note = Description of Artificial Sequence: Synthetic oligonucleotide
  misc_feature 1..20: note = Target: ANGPTL4; (+) strand; PAM type: NRG; PAM sequence: CAG
  source 1..20: mol_type = other DNA
tgaggtcaggagttagagac

SEQ ID NO: 10005 - DNA, 20 bp, synthetic construct
  misc_feature 1..20: note = Description of Artificial Sequence: Synthetic oligonucleotide
  misc_feature 1..20: note = Target: ANGPTL4; (+) strand; PAM type: NRG; PAM sequence: TGG
  source 1..20: mol_type = other DNA
tcaggagttagagaccagcc

SEQ ID NO: 10006 - DNA, 20 bp, synthetic construct
  misc_feature 1..20: note = Description of Artificial Sequence: Synthetic oligonucleotide
  misc_feature 1..20: note = Target: ANGPTL4; (+) strand; PAM type: NRG; PAM sequence: TGG
  source 1..20: mol_type = other DNA
gttagagaccagcctggaca

SEQ ID NO: 10007 - DNA, 20 bp, synthetic construct
  misc_feature 1..20: note = Description of Artificial Sequence: Synthetic oligonucleotide
  misc_feature 1..20: note = Target: ANGPTL4; (+) strand; PAM type: NRG; PAM sequence: TAG
  source 1..20: mol_type = other DNA
ctctactaaaatacaaaaat

SEQ ID NO: 10008 - DNA, 20 bp, synthetic construct
  misc_feature 1..20: note = Description of Artificial Sequence: Synthetic oligonucleotide
  misc_feature 1..20: note = Target: ANGPTL4; (+) strand; PAM type: NRG; PAM sequence: CAG
  source 1..20: mol_type = other DNA
actaaaatacaaaaattagc

SEQ ID NO: 10009 - DNA, 20 bp, synthetic construct
  misc_feature 1..20: note = Description of Artificial Sequence: Synthetic oligonucleotide
  misc_feature 1..20: note = Target: ANGPTL4; (+) strand; PAM type: NRG; PAM sequence: AGG
  source 1..20: mol_type = other DNA
ctaaaatacaaaaattagcc

SEQ ID NO: 10010 - DNA, 20 bp, synthetic construct
  misc_feature 1..20: note = Description of Artificial Sequence: Synthetic oligonucleotide
  misc_feature 1..20: note = Target: ANGPTL4; (+) strand; PAM type: NRG; PAM sequence: TGG
  source 1..20: mol_type = other DNA
atacaaaaattagccaggcg

SEQ ID NO: 10011 - DNA, 20 bp, synthetic construct
  misc_feature 1..20: note = Description of Artificial Sequence: Synthetic oligonucleotide
  misc_feature 1..20: note = Target: ANGPTL4; (+) strand; PAM type: NRG; PAM sequence: TGG
  source 1..20: mol_type = other DNA
caaaaattagccaggcgtgg

SEQ ID NO: 10012 - DNA, 20 bp, synthetic construct
  misc_feature 1..20: note = Description of Artificial Sequence: Synthetic oligonucleotide
  misc_feature 1..20: note = Target: ANGPTL4; (+) strand; PAM type: NRG; PAM sequence: TGG
  source 1..20: mol_type = other DNA
aaattagccaggcgtggtgg

SEQ ID NO: 10013 - DNA, 20 bp, synthetic construct
  misc_feature 1..20: note = Description of Artificial Sequence: Synthetic oligonucleotide
  misc_feature 1..20: note = Target: ANGPTL4; (+) strand; PAM type: NRG; PAM sequence: GGG
  source 1..20: mol_type = other DNA
aattagccaggcgtggtggt

SEQ ID NO: 10014 - DNA, 20 bp, synthetic construct
  misc_feature 1..20: note = Description of Artificial Sequence: Synthetic oligonucleotide
  misc_feature 1..20: note = Target: ANGPTL4; (+) strand; PAM type: NRG; PAM sequence: CAG
  source 1..20: mol_type = other DNA
gtggtgggcacctgtaatcc

SEQ ID NO: 10015 - DNA, 20 bp, synthetic construct
  misc_feature 1..20: note = Description of Artificial Sequence: Synthetic oligonucleotide
  misc_feature 1..20: note = Target: ANGPTL4; (+) strand; PAM type: NRG; PAM sequence: CGG
  source 1..20: mol_type = other DNA
cacctgtaatcccagctact

SEQ ID NO: 10016 - DNA, 20 bp, synthetic construct
  misc_feature 1..20: note = Description of Artificial Sequence: Synthetic oligonucleotide
  misc_feature 1..20: note = Target: ANGPTL4; (+) strand; PAM type: NRG; PAM sequence: GGG
  source 1..20: mol_type = other DNA
acctgtaatcccagctactc

SEQ ID NO: 10017 - DNA, 20 bp, synthetic construct
  misc_feature 1..20: note = Description of Artificial Sequence: Synthetic oligonucleotide
  misc_feature 1..20: note = Target: ANGPTL4; (+) strand; PAM type: NRG; PAM sequence: GAG
  source 1..20: mol_type = other DNA
ctgtaatcccagctactcgg

SEQ ID NO: 10018 - DNA, 20 bp, synthetic construct
  misc_feature 1..20: note = Description of Artificial Sequence: Synthetic oligonucleotide
  misc_feature 1..20: note = Target: ANGPTL4; (+) strand; PAM type: NRG; PAM sequence: AGG
  source 1..20: mol_type = other DNA
tgtaatcccagctactcggg

SEQ ID NO: 10019 - DNA, 20 bp, synthetic construct
  misc_feature 1..20: note = Description of Artificial Sequence: Synthetic oligonucleotide
  misc_feature 1..20: note = Target: ANGPTL4; (+) strand; PAM type: NRG; PAM sequence: GAG
  source 1..20: mol_type = other DNA
tcccagctactcgggaggct

SEQ ID NO: 10020 - DNA, 20 bp, synthetic construct
  misc_feature 1..20: note = Description of Artificial Sequence: Synthetic oligonucleotide
  misc_feature 1..20: note = Target: ANGPTL4; (+) strand; PAM type: NRG; PAM sequence: AGG
  source 1..20: mol_type = other DNA
cccagctactcgggaggctg

SEQ ID NO: 10021 - DNA, 20 bp, synthetic construct
  misc_feature 1..20: note = Description of Artificial Sequence: Synthetic oligonucleotide
  misc_feature 1..20: note = Target: ANGPTL4; (+) strand; PAM type: NRG; PAM sequence: CAG
  source 1..20: mol_type = other DNA
agctactcgggaggctgagg

SEQ ID NO: 10022 - DNA, 20 bp, synthetic construct
  misc_feature 1..20: note = Description of Artificial Sequence: Synthetic oligonucleotide
  misc_feature 1..20: note = Target: ANGPTL4; (+) strand; PAM type: NRG; PAM sequence: AGG
  source 1..20: mol_type = other DNA
gctactcgggaggctgaggc

SEQ ID NO: 10023 - DNA, 20 bp, synthetic construct
  misc_feature 1..20: note = Description of Artificial Sequence: Synthetic oligonucleotide
  misc_feature 1..20: note = Target: ANGPTL4; (+) strand; PAM type: NRG; PAM sequence: GAG
  source 1..20: mol_type = other DNA
tactcgggaggctgaggcag

SEQ ID NO: 10024 - DNA, 20 bp, synthetic construct
  misc_feature 1..20: note = Description of Artificial Sequence: Synthetic oligonucleotide
  misc_feature 1..20: note = Target: ANGPTL4; (+) strand; PAM type: NRG; PAM sequence: CAG
  source 1..20: mol_type = other DNA
gcaggagaatcatttgaacc

SEQ ID NO: 10025 - DNA, 20 bp, synthetic construct
  misc_feature 1..20: note = Description of Artificial Sequence: Synthetic oligonucleotide
  misc_feature 1..20: note = Target: ANGPTL4; (+) strand; PAM type: NRG; PAM sequence: AGG
  source 1..20: mol_type = other DNA
caggagaatcatttgaaccc

SEQ ID NO: 10026 - DNA, 20 bp, synthetic construct
  misc_feature 1..20: note = Description of Artificial Sequence: Synthetic oligonucleotide
  misc_feature 1..20: note = Target: ANGPTL4; (+) strand; PAM type: NRG; PAM sequence: GAG
  source 1..20: mol_type = other DNA
ggagaatcatttgaacccag

SEQ ID NO: 10027 - DNA, 20 bp, synthetic construct
  misc_feature 1..20: note = Description of Artificial Sequence: Synthetic oligonucleotide
  misc_feature 1..20: note = Target: ANGPTL4; (+) strand; PAM type: NRG; PAM sequence: AGG
  source 1..20: mol_type = other DNA
gagaatcatttgaacccagg

SEQ ID NO: 10028 - DNA, 20 bp, synthetic construct
  misc_feature 1..20: note = Description of Artificial Sequence: Synthetic oligonucleotide
  misc_feature 1..20: note = Target: ANGPTL4; (+) strand; PAM type: NRG; PAM sequence: TGG
  source 1..20: mol_type = other DNA
aatcatttgaacccaggagg

SEQ ID NO: 10029 - DNA, 20 bp, synthetic construct
  misc_feature 1..20: note = Description of Artificial Sequence: Synthetic oligonucleotide
  misc_feature 1..20: note = Target: ANGPTL4; (+) strand; PAM type: NRG; PAM sequence: AAG
  source 1..20: mol_type = other DNA
catttgaacccaggaggtgg

SEQ ID NO: 10030 - DNA, 20 bp, synthetic construct
  misc_feature 1..20: note = Description of Artificial Sequence: Synthetic oligonucleotide
  misc_feature 1..20: note = Target: ANGPTL4; (+) strand; PAM type: NRG; PAM sequence: CAG
  source 1..20: mol_type = other DNA
aacccaggaggtggaagttg

SEQ ID NO: 10031 - DNA, 20 bp, synthetic construct
  misc_feature 1..20: note = Description of Artificial Sequence: Synthetic oligonucleotide
  misc_feature 1..20: note = Target: ANGPTL4; (+) strand; PAM type: NRG; PAM sequence: GAG
  source 1..20: mol_type = other DNA
caggaggtggaagttgcagt

SEQ ID NO: 10032 - DNA, 20 bp, synthetic construct
  misc_feature 1..20: note = Description of Artificial Sequence: Synthetic oligonucleotide
  misc_feature 1..20: note = Target: ANGPTL4; (+) strand; PAM type: NRG; PAM sequence: CAG
  source 1..20: mol_type = other DNA
gaggtggaagttgcagtgag

SEQ ID NO: 10033 - DNA, 20 bp, synthetic construct
  misc_feature 1..20: note = Description of Artificial Sequence: Synthetic oligonucleotide
  misc_feature 1..20: note = Target: ANGPTL4; (+) strand; PAM type: NRG; PAM sequence: GAG
  source 1..20: mol_type = other DNA
ggtggaagttgcagtgagca

SEQ ID NO: 10034 - DNA, 20 bp, synthetic construct
  misc_feature 1..20: note = Description of Artificial Sequence: Synthetic oligonucleotide
  misc_feature 1..20: note = Target: ANGPTL4; (+) strand; PAM type: NRG; PAM sequence: CAG
  source 1..20: mol_type = other DNA
gagattgcaccactgcactc

SEQ ID NO: 10035 - DNA, 20 bp, synthetic construct
  misc_feature 1..20: note = Description of Artificial Sequence: Synthetic oligonucleotide
  misc_feature 1..20: note = Target: ANGPTL4; (+) strand; PAM type: NRG; PAM sequence: TGG
  source 1..20: mol_type = other DNA
gcaccactgcactccagcct

SEQ ID NO: 10036 - DNA, 20 bp, synthetic construct
  misc_feature 1..20: note = Description of Artificial Sequence: Synthetic oligonucleotide
  misc_feature 1..20: note = Target: ANGPTL4; (+) strand; PAM type: NRG; PAM sequence: CAG
  source 1..20: mol_type = other DNA
ctgcactccagccttggcga

SEQ ID NO: 10037 - DNA, 20 bp, synthetic construct
  misc_feature 1..20: note = Description of Artificial Sequence: Synthetic oligonucleotide
  misc_feature 1..20: note = Target: ANGPTL4; (+) strand; PAM type: NRG; PAM sequence: GAG
  source 1..20: mol_type = other DNA
gcactccagccttggcgaca

SEQ ID NO: 10038 - DNA, 20 bp, synthetic construct
  misc_feature 1..20: note = Description of Artificial Sequence: Synthetic oligonucleotide
  misc_feature 1..20: note = Target: ANGPTL4; (+) strand; PAM type: NRG; PAM sequence: AAG
  source 1..20: mol_type = other DNA
tccagccttggcgacagagc

SEQ ID NO: 10039 - DNA, 20 bp, synthetic construct
  misc_feature 1..20: note = Description of Artificial Sequence: Synthetic oligonucleotide
  misc_feature 1..20: note = Target: ANGPTL4; (+) strand; PAM type: NRG; PAM sequence: AAG
  source 1..20: mol_type = other DNA
caagactctgtctcaaaaaa

SEQ ID NO: 10040 - DNA, 20 bp, synthetic construct
  misc_feature 1..20: note = Description of Artificial Sequence: Synthetic oligonucleotide
  misc_feature 1..20: note = Target: ANGPTL4; (+) strand; PAM type: NRG; PAM sequence: AAG
  source 1..20: mol_type = other DNA
ctcaaaaaaaagaaaaaaaa

SEQ ID NO: 10041 - DNA, 20 bp, synthetic construct
  misc_feature 1..20: note = Description of Artificial Sequence: Synthetic oligonucleotide
  misc_feature 1..20: note = Target: ANGPTL4; (+) strand; PAM type: NRG; PAM sequence: AAG
  source 1..20: mol_type = other DNA
aaaaaagaaaaaaaaaagaa

SEQ ID NO: 10042 - DNA, 20 bp, synthetic construct
  misc_feature 1..20: note = Description of Artificial Sequence: Synthetic oligonucleotide
  misc_feature 1..20: note = Target: ANGPTL4; (+) strand; PAM type: NRG; PAM sequence: AAG
  source 1..20: mol_type = other DNA
agaaaaaaaaaagaaaagaa

SEQ ID NO: 10043 - DNA, 20 bp, synthetic construct
  misc_feature 1..20: note = Description of Artificial Sequence: Synthetic oligonucleotide
  misc_feature 1..20: note = Target: ANGPTL4; (+) strand; PAM type: NRG; PAM sequence: AAG
  source 1..20: mol_type = other DNA
aaagaaaagaaaagaaaaaa

SEQ ID NO: 10044 - DNA, 20 bp, synthetic construct
  misc_feature 1..20: note = Description of Artificial Sequence: Synthetic oligonucleotide
  misc_feature 1..20: note = Target: ANGPTL4; (+) strand; PAM type: NRG; PAM sequence: AAG
  source 1..20: mol_type = other DNA
aagaaaagaaaaaaaagaaa

SEQ ID NO: 10045 - DNA, 20 bp, synthetic construct
  misc_feature 1..20: note = Description of Artificial Sequence: Synthetic oligonucleotide
  misc_feature 1..20: note = Target: ANGPTL4; (+) strand; PAM type: NRG; PAM sequence: AAG
  source 1..20: mol_type = other DNA
aaaaaaaagaaaaagaaaaa

SEQ ID NO: 10046 - DNA, 20 bp, synthetic construct
  misc_feature 1..20: note = Description of Artificial Sequence: Synthetic oligonucleotide
  misc_feature 1..20: note = Target: ANGPTL4; (+) strand; PAM type: NRG; PAM sequence: TGG
  source 1..20: mol_type = other DNA
aaatatacataatataaaat

SEQ ID NO: 10047 - DNA, 20 bp, synthetic construct
  misc_feature 1..20: note = Description of Artificial Sequence: Synthetic oligonucleotide
  misc_feature 1..20: note = Target: ANGPTL4; (+) strand; PAM type: NRG; PAM sequence: TGG
  source 1..20: mol_type = other DNA
ttaacaatttttaactatgt

SEQ ID NO: 10048 - DNA, 20 bp, synthetic construct
  misc_feature 1..20: note = Description of Artificial Sequence: Synthetic oligonucleotide
  misc_feature 1..20: note = Target: ANGPTL4; (+) strand; PAM type: NRG; PAM sequence: AAG
  source 1..20: mol_type = other DNA
atttttaactatgttggcca

SEQ ID NO: 10049 - DNA, 20 bp, synthetic construct
  misc_feature 1..20: note = Description of Artificial Sequence: Synthetic oligonucleotide
  misc_feature 1..20: note = Target: ANGPTL4; (+) strand; PAM type: NRG; PAM sequence: TAG
  source 1..20: mol_type = other DNA
tttaactatgttggccaaag

SEQ ID NO: 10050 - DNA, 20 bp, synthetic construct
  misc_feature 1..20: note = Description of Artificial Sequence: Synthetic oligonucleotide
  misc_feature 1..20: note = Target: ANGPTL4; (+) strand; PAM type: NRG; PAM sequence: TGG
  source 1..20: mol_type = other DNA
ggccaaagtagcccacgcgt

SEQ ID NO: 10051 - DNA, 20 bp, synthetic construct
  misc_feature 1..20: note = Description of Artificial Sequence: Synthetic oligonucleotide
  misc_feature 1..20: note = Target: ANGPTL4; (+) strand; PAM type: NRG; PAM sequence: GGG
  source 1..20: mol_type = other DNA
gccaaagtagcccacgcgtt

SEQ ID NO: 10052 - DNA, 20 bp, synthetic construct
  misc_feature 1..20: note = Description of Artificial Sequence: Synthetic oligonucleotide
  misc_feature 1..20: note = Target: ANGPTL4; (+) strand; PAM type: NRG; PAM sequence: TGG
  source 1..20: mol_type = other DNA
agtagcccacgcgttgggat

SEQ ID NO: 10053 - DNA, 20 bp, synthetic construct
  misc_feature 1..20: note = Description of Artificial Sequence: Synthetic oligonucleotide
  misc_feature 1..20: note = Target: ANGPTL4; (+) strand; PAM type: NRG; PAM sequence: GAG
  source 1..20: mol_type = other DNA
tagcccacgcgttgggattg

SEQ ID NO: 10054 - DNA, 20 bp, synthetic construct
  misc_feature 1..20: note = Description of Artificial Sequence: Synthetic oligonucleotide
  misc_feature 1..20: note = Target: ANGPTL4; (+) strand; PAM type: NRG; PAM sequence: CGG
  source 1..20: mol_type = other DNA
acgcgttgggattggagacc

SEQ ID NO: 10055 - DNA, 20 bp, synthetic construct
  misc_feature 1..20: note = Description of Artificial Sequence: Synthetic oligonucleotide
  misc_feature 1..20: note = Target: ANGPTL4; (+) strand; PAM type: NRG; PAM sequence: CAG
  source 1..20: mol_type = other DNA
cttgcccaccgtgatcgccc

SEQ ID NO: 10056 - DNA, 20 bp, synthetic construct
  misc_feature 1..20: note = Description of Artificial Sequence: Synthetic oligonucleotide
  misc_feature 1..20: note = Target: ANGPTL4; (+) strand; PAM type: NRG; PAM sequence: CAG
  source 1..20: mol_type = other DNA
ccaccgtgatcgccccagta

SEQ ID NO: 10057 - DNA, 20 bp, synthetic construct
  misc_feature 1..20: note = Description of Artificial Sequence: Synthetic oligonucleotide
  misc_feature 1..20: note = Target: ANGPTL4; (+) strand; PAM type: NRG; PAM sequence: TGG
  source 1..20: mol_type = other DNA
gatcgccccagtacagtgcc

SEQ ID NO: 10058 - DNA, 20 bp, synthetic construct
  misc_feature 1..20: note = Description of Artificial Sequence: Synthetic oligonucleotide
  misc_feature 1..20: note = Target: ANGPTL4; (+) strand; PAM type: NRG; PAM sequence: TAG
  source 1..20: mol_type = other DNA
ccagtacagtgcctggcata

SEQ ID NO: 10059 - DNA, 20 bp, synthetic construct
  misc_feature 1..20: note = Description of Artificial Sequence: Synthetic oligonucleotide
  misc_feature 1..20: note = Target: ANGPTL4; (+) strand; PAM type: NRG; PAM sequence: TAG
  source 1..20: mol_type = other DNA
gtacagtgcctggcatatag

SEQ ID NO: 10060 - DNA, 20 bp, synthetic construct
  misc_feature 1..20: note = Description of Artificial Sequence: Synthetic oligonucleotide
  misc_feature 1..20: note = Target: ANGPTL4; (+) strand; PAM type: NRG; PAM sequence: AGG
  source 1..20: mol_type = other DNA
tacagtgcctggcatatagt

SEQ ID NO: 10061 - DNA, 20 bp, synthetic construct
  misc_feature 1..20: note = Description of Artificial Sequence: Synthetic oligonucleotide
  misc_feature 1..20: note = Target: ANGPTL4; (+) strand; PAM type: NRG; PAM sequence: CAG
  source 1..20: mol_type = other DNA
ctggcatatagtaggtgctc

SEQ ID NO: 10062 - DNA, 20 bp, synthetic construct
  misc_feature 1..20: note = Description of Artificial Sequence: Synthetic oligonucleotide
  misc_feature 1..20: note = Target: ANGPTL4; (+) strand; PAM type: NRG; PAM sequence: AGG
  source 1..20: mol_type = other DNA
tggcatatagtaggtgctcc

SEQ ID NO: 10063 - DNA, 20 bp, synthetic construct
  misc_feature 1..20: note = Description of Artificial Sequence: Synthetic oligonucleotide
  misc_feature 1..20: note = Target: ANGPTL4; (+) strand; PAM type: NRG; PAM sequence: CAG
  source 1..20: mol_type = other DNA
gtgctccaggaacaattgat

SEQ ID NO: 10064 - DNA, 20 bp, synthetic construct
  misc_feature 1..20: note = Description of Artificial Sequence: Synthetic oligonucleotide
  misc_feature 1..20: note = Target: ANGPTL4; (+) strand; PAM type: NRG; PAM sequence: AGG
  source 1..20: mol_type = other DNA
tgctccaggaacaattgatc

SEQ ID NO: 10065 - DNA, 20 bp, synthetic construct
  misc_feature 1..20: note = Description of Artificial Sequence: Synthetic oligonucleotide
  misc_feature 1..20: note = Target: ANGPTL4; (+) strand; PAM type: NRG; PAM sequence: TGG
  source 1..20: mol_type = other DNA
caggatgactttgtctttgc

SEQ ID NO: 10066 - DNA, 20 bp, synthetic construct
  misc_feature 1..20: note = Description of Artificial Sequence: Synthetic oligonucleotide
  misc_feature 1..20: note = Target: ANGPTL4; (+) strand; PAM type: NRG; PAM sequence: GGG
  source 1..20: mol_type = other DNA
aggatgactttgtctttgct

SEQ ID NO: 10067 - DNA, 20 bp, synthetic construct
  misc_feature 1..20: note = Description of Artificial Sequence: Synthetic oligonucleotide
  misc_feature 1..20: note = Target: ANGPTL4; (+) strand; PAM type: NRG; PAM sequence: AAG
  source 1..20: mol_type = other DNA
tgactttgtctttgctgggt

SEQ ID NO: 10068 - DNA, 20 bp, synthetic construct
  misc_feature 1..20: note = Description of Artificial Sequence: Synthetic oligonucleotide
  misc_feature 1..20: note = Target: ANGPTL4; (+) strand; PAM type: NRG; PAM sequence: GAG
  source 1..20: mol_type = other DNA
actttgtctttgctgggtaa

SEQ ID NO: 10069 - DNA, 20 bp, synthetic construct
  misc_feature 1..20: note = Description of Artificial Sequence: Synthetic oligonucleotide
  misc_feature 1..20: note = Target: ANGPTL4; (+) strand; PAM type: NRG; PAM sequence: AGG
  source 1..20: mol_type = other DNA
ctttgtctttgctgggtaag

SEQ ID NO: 10070 - DNA, 20 bp, synthetic construct
  misc_feature 1..20: note = Description of Artificial Sequence: Synthetic oligonucleotide
  misc_feature 1..20: note = Target: ANGPTL4; (+) strand; PAM type: NRG; PAM sequence: AAG
  source 1..20: mol_type = other DNA
gggtaagaggccacattcta

SEQ ID NO: 10071 - DNA, 20 bp, synthetic construct
  misc_feature 1..20: note = Description of Artificial Sequence: Synthetic oligonucleotide
  misc_feature 1..20: note = Target: ANGPTL4; (+) strand; PAM type: NRG; PAM sequence: AGG
  source 1..20: mol_type = other DNA
ggtaagaggccacattctaa

SEQ ID NO: 10072 - DNA, 20 bp, synthetic construct
  misc_feature 1..20: note = Description of Artificial Sequence: Synthetic oligonucleotide
  misc_feature 1..20: note = Target: ANGPTL4; (+) strand; PAM type: NRG; PAM sequence: CAG
  source 1..20: mol_type = other DNA
agaggccacattctaaaggt

SEQ ID NO: 10073 - DNA, 20 bp, synthetic construct
  misc_feature 1..20: note = Description of Artificial Sequence: Synthetic oligonucleotide
  misc_feature 1..20: note = Target: ANGPTL4; (+) strand; PAM type: NRG; PAM sequence: TGG
  source 1..20: mol_type = other DNA
acattctaaaggtcagtttt

SEQ ID NO: 10074 - DNA, 20 bp, synthetic construct
  misc_feature 1..20: note = Description of Artificial Sequence: Synthetic oligonucleotide
  misc_feature 1..20: note = Target: ANGPTL4; (+) strand; PAM type: NRG; PAM sequence: CAG
  source 1..20: mol_type = other DNA
tctaaaggtcagtttttggc

SEQ ID NO: 10075 - DNA, 20 bp, synthetic construct
  misc_feature 1..20: note = Description of Artificial Sequence: Synthetic oligonucleotide
  misc_feature 1..20: note = Target: ANGPTL4; (+) strand; PAM type: NRG; PAM sequence: AGG
  source 1..20: mol_type = other DNA
ctaaaggtcagtttttggcc

SEQ ID NO: 10076 - DNA, 20 bp, synthetic construct
  misc_feature 1..20: note = Description of Artificial Sequence: Synthetic oligonucleotide
  misc_feature 1..20: note = Target: ANGPTL4; (+) strand; PAM type: NRG; PAM sequence: CAG
  source 1..20: mol_type = other DNA
ggtcagtttttggccaggca

SEQ ID NO: 10077 - DNA, 20 bp, synthetic construct
  misc_feature 1..20: note = Description of Artificial Sequence: Synthetic oligonucleotide
  misc_feature 1..20: note = Target: ANGPTL4; (+) strand; PAM type: NRG; PAM sequence: CAG
  source 1..20: mol_type = other DNA
gtgactcacacctgtcatcc

SEQ ID NO: 10078 - DNA, 20 bp, synthetic construct
  misc_feature 1..20: note = Description of Artificial Sequence: Synthetic oligonucleotide
  misc_feature 1..20: note = Target: ANGPTL4; (+) strand; PAM type: NRG; PAM sequence: TGG
  source 1..20: mol_type = other DNA
cacctgtcatcccagcactt

SEQ ID NO: 10079 - DNA, 20 bp, synthetic construct
  misc_feature 1..20: note = Description of Artificial Sequence: Synthetic oligonucleotide
  misc_feature 1..20: note = Target: ANGPTL4; (+) strand; PAM type: NRG; PAM sequence: GGG
  source 1..20: mol_type = other DNA
acctgtcatcccagcacttt

SEQ ID NO: 10080 - DNA, 20 bp, synthetic construct
  misc_feature 1..20: note = Description of Artificial Sequence: Synthetic oligonucleotide
  misc_feature 1..20: note = Target: ANGPTL4; (+) strand; PAM type: NRG; PAM sequence: GAG
  source 1..20: mol_type = other DNA
ctgtcatcccagcactttgg

SEQ ID NO: 10081 - DNA, 20 bp, synthetic construct
  misc_feature 1..20: note = Description of Artificial Sequence: Synthetic oligonucleotide
  misc_feature 1..20: note = Target: ANGPTL4; (+) strand; PAM type: NRG; PAM sequence: AGG
  source 1..20: mol_type = other DNA
tgtcatcccagcactttggg

SEQ ID NO: 10082 - DNA, 20 bp, synthetic construct
  misc_feature 1..20: note = Description of Artificial Sequence: Synthetic oligonucleotide
  misc_feature 1..20: note = Target: ANGPTL4; (+) strand; PAM type: NRG; PAM sequence: GAG
  source 1..20: mol_type = other DNA
tcccagcactttgggaggcc

SEQ ID NO: 10083 - DNA, 20 bp, synthetic construct
  misc_feature 1..20: note = Description of Artificial Sequence: Synthetic oligonucleotide
  misc_feature 1..20: note = Target: ANGPTL4; (+) strand; PAM type: NRG; PAM sequence: AGG
  source 1..20: mol_type = other DNA
cccagcactttgggaggccg

SEQ ID NO: 10084 - DNA, 20 bp, synthetic construct
  misc_feature 1..20: note = Description of Artificial Sequence: Synthetic oligonucleotide
  misc_feature 1..20: note = Target: ANGPTL4; (+) strand; PAM type: NRG; PAM sequence: GAG
  source 1..20: mol_type = other DNA
gcactttgggaggccgaggc

SEQ ID NO: 10085 - DNA, 20 bp, synthetic construct
  misc_feature 1..20: note = Description of Artificial Sequence: Synthetic oligonucleotide
  misc_feature 1..20: note = Target: ANGPTL4; (+) strand; PAM type: NRG; PAM sequence: GAG
  source 1..20: mol_type = other DNA
ccgaggcgagtgaatccctt

SEQ ID NO: 10086 - DNA, 20 bp, synthetic construct
  misc_feature 1..20: note = Description of Artificial Sequence: Synthetic oligonucleotide
  misc_feature 1..20: note = Target: ANGPTL4; (+) strand; PAM type: NRG; PAM sequence: CAG
  source 1..20: mol_type = other DNA
gcgagtgaatcccttgagct

SEQ ID NO: 10087 - DNA, 20 bp, synthetic construct
  misc_feature 1..20: note = Description of Artificial Sequence: Synthetic oligonucleotide
  misc_feature 1..20: note = Target: ANGPTL4; (+) strand; PAM type: NRG; PAM sequence: AGG
  source 1..20: mol_type = other DNA
cgagtgaatcccttgagctc

SEQ ID NO: 10088 - DNA, 20 bp, synthetic construct
  misc_feature 1..20: note = Description of Artificial Sequence: Synthetic oligonucleotide
  misc_feature 1..20: note = Target: ANGPTL4; (+) strand; PAM type: NRG; PAM sequence: GAG
  source 1..20: mol_type = other DNA
agtgaatcccttgagctcag

SEQ ID NO: 10089 - DNA, 20 bp, synthetic construct
  misc_feature 1..20: note = Description of Artificial Sequence: Synthetic oligonucleotide
  misc_feature 1..20: note = Target: ANGPTL4; (+) strand; PAM type: NRG; PAM sequence: AAG
  source 1..20: mol_type = other DNA
tcccttgagctcaggagttc

SEQ ID NO: 10090 - DNA, 20 bp, synthetic construct
  misc_feature 1..20: note = Description of Artificial Sequence: Synthetic oligonucleotide
  misc_feature 1..20: note = Target: ANGPTL4; (+) strand; PAM type: NRG; PAM sequence: CAG
  source 1..20: mol_type = other DNA
tgagctcaggagttcaagac

SEQ ID NO: 10091 - DNA, 20 bp, synthetic construct
  misc_feature 1..20: note = Description of Artificial Sequence: Synthetic oligonucleotide
  misc_feature 1..20: note = Target: ANGPTL4; (+) strand; PAM type: NRG; PAM sequence: TGG
  source 1..20: mol_type = other DNA
tcaggagttcaagaccagcc

SEQ ID NO: 10092 - DNA, 20 bp, synthetic construct
  misc_feature 1..20: note = Description of Artificial Sequence: Synthetic oligonucleotide
  misc_feature 1..20: note = Target: ANGPTL4; (+) strand; PAM type: NRG; PAM sequence: GGG
  source 1..20: mol_type = other DNA
caggagttcaagaccagcct

SEQ ID NO: 10093 - DNA, 20 bp, synthetic construct
  misc_feature 1..20: note = Description of Artificial Sequence: Synthetic oligonucleotide
  misc_feature 1..20: note = Target: ANGPTL4; (+) strand; PAM type: NRG; PAM sequence: CGG
  source 1..20: mol_type = other DNA
caagaccagcctgggcaaca

SEQ ID NO: 10094 - DNA, 20 bp, synthetic construct
  misc_feature 1..20: note = Description of Artificial Sequence: Synthetic oligonucleotide
  misc_feature 1..20: note = Target: ANGPTL4; (+) strand; PAM type: NRG; PAM sequence: CAG
  source 1..20: mol_type = other DNA
tcctgtctctacaaaatcta

SEQ ID NO: 10095 - DNA, 20 bp, synthetic construct
  misc_feature 1..20: note = Description of Artificial Sequence: Synthetic oligonucleotide
  misc_feature 1..20: note = Target: ANGPTL4; (+) strand; PAM type: NRG; PAM sequence: TAG
  source 1..20: mol_type = other DNA
tctacaaaatctacagaaat

SEQ ID NO: 10096 - DNA, 20 bp, synthetic construct
  misc_feature 1..20: note = Description of Artificial Sequence: Synthetic oligonucleotide
  misc_feature 1..20: note = Target: ANGPTL4; (+) strand; PAM type: NRG; PAM sequence: AGG
  source 1..20: mol_type = other DNA
ctacaaaatctacagaaatt

SEQ ID NO: 10097 - DNA, 20 bp, synthetic construct
  misc_feature 1..20: note = Description of Artificial Sequence: Synthetic oligonucleotide
  misc_feature 1..20: note = Target: ANGPTL4; (+) strand; PAM type: NRG; PAM sequence: CAG
  source 1..20: mol_type = other DNA
caaaatctacagaaattagg

SEQ ID NO: 10098 - DNA, 20 bp, synthetic construct
  misc_feature 1..20: note = Description of Artificial Sequence: Synthetic oligonucleotide
  misc_feature 1..20: note = Target: ANGPTL4; (+) strand; PAM type: NRG; PAM sequence: AGG
  source 1..20: mol_type = other DNA
aaaatctacagaaattaggc

SEQ ID NO: 10099 - DNA, 20 bp, synthetic construct
  misc_feature 1..20: note = Description of Artificial Sequence: Synthetic oligonucleotide
  misc_feature 1..20: note = Target: ANGPTL4; (+) strand; PAM type: NRG; PAM sequence: TGG
  source 1..20: mol_type = other DNA
ctacagaaattaggcaggtc

SEQ ID NO: 10100 - DNA, 20 bp, synthetic construct
  misc_feature 1..20: note = Description of Artificial Sequence: Synthetic oligonucleotide
  misc_feature 1..20: note = Target: ANGPTL4; (+) strand; PAM type: NRG; PAM sequence: TGG
  source 1..20: mol_type = other DNA
cagaaattaggcaggtctgg

SEQ ID NO: 10101 - DNA, 20 bp, synthetic construct
  misc_feature 1..20: note = Description of Artificial Sequence: Synthetic oligonucleotide
  misc_feature 1..20: note = Target: ANGPTL4; (+) strand; PAM type: NRG; PAM sequence: TAG
  source 1..20: mol_type = other DNA
ggtctggtggcacatgccta

SEQ ID NO: 10102 - DNA, 20 bp, synthetic construct
  misc_feature 1..20: note = Description of Artificial Sequence: Synthetic oligonucleotide
  misc_feature 1..20: note = Target: ANGPTL4; (+) strand; PAM type: NRG; PAM sequence: CAG
  source 1..20: mol_type = other DNA
gtggcacatgcctatagtcc

SEQ ID NO: 10103 - DNA, 20 bp, synthetic construct
  misc_feature 1..20: note = Description of Artificial Sequence: Synthetic oligonucleotide
  misc_feature 1..20: note = Target: ANGPTL4; (+) strand; PAM type: NRG; PAM sequence: TGG
  source 1..20: mol_type = other DNA
tgcctatagtcccagctgct

SEQ ID NO: 10104 - DNA, 20 bp, synthetic construct
  misc_feature 1..20: note = Description of Artificial Sequence: Synthetic oligonucleotide
  misc_feature 1..20: note = Target: ANGPTL4; (+) strand; PAM type: NRG; PAM sequence: GGG
  source 1..20: mol_type = other DNA
gcctatagtcccagctgctt

SEQ ID NO: 10105 - DNA, 20 bp, synthetic construct
  misc_feature 1..20: note = Description of Artificial Sequence: Synthetic oligonucleotide
  misc_feature 1..20: note = Target: ANGPTL4; (+) strand; PAM type: NRG; PAM sequence: GAG
  source 1..20: mol_type = other DNA
ctatagtcccagctgcttgg

SEQ ID NO: 10106 - DNA, 20 bp, synthetic construct
  misc_feature 1..20: note = Description of Artificial Sequence: Synthetic oligonucleotide
  misc_feature 1..20: note = Target: ANGPTL4; (+) strand; PAM type: NRG; PAM sequence: AGG
  source 1..20: mol_type = other DNA
tatagtcccagctgcttggg

SEQ ID NO: 10107 - DNA, 20 bp, synthetic construct
  misc_feature 1..20: note = Description of Artificial Sequence: Synthetic oligonucleotide
  misc_feature 1..20: note = Target: ANGPTL4; (+) strand; PAM type: NRG; PAM sequence: GAG
  source 1..20: mol_type = other DNA
tcccagctgcttgggaggct

SEQ ID NO: 10108 - DNA, 20 bp, synthetic construct
  misc_feature 1..20: note = Description of Artificial Sequence: Synthetic oligonucleotide
  misc_feature 1..20: note = Target: ANGPTL4; (+) strand; PAM type: NRG; PAM sequence: AGG
  source 1..20: mol_type = other DNA
cccagctgcttgggaggctg

SEQ ID NO: 10109 - DNA, 20 bp, synthetic construct
  misc_feature 1..20: note = Description of Artificial Sequence: Synthetic oligonucleotide
  misc_feature 1..20: note = Target: ANGPTL4; (+) strand; PAM type: NRG; PAM sequence: TGG
  source 1..20: mol_type = other DNA
agctgcttgggaggctgagg

SEQ ID NO: 10110 - DNA, 20 bp, synthetic construct
  misc_feature 1..20: note = Description of Artificial Sequence: Synthetic oligonucleotide
  misc_feature 1..20: note = Target: ANGPTL4; (+) strand; PAM type: NRG; PAM sequence: GGG
  source 1..20: mol_type = other DNA
gctgcttgggaggctgaggt

SEQ ID NO: 10111 - DNA, 20 bp, synthetic construct
  misc_feature 1..20: note = Description of Artificial Sequence: Synthetic oligonucleotide
  misc_feature 1..20: note = Target: ANGPTL4; (+) strand; PAM type: NRG; PAM sequence: GAG
  source 1..20: mol_type = other DNA
tgcttgggaggctgaggtgg

SEQ ID NO: 10112 - DNA, 20 bp, synthetic construct
  misc_feature 1..20: note = Description of Artificial Sequence: Synthetic oligonucleotide
  misc_feature 1..20: note = Target: ANGPTL4; (+) strand; PAM type: NRG; PAM sequence: AGG
  source 1..20: mol_type = other DNA
gcttgggaggctgaggtggg

SEQ ID NO: 10113 - DNA, 20 bp, synthetic construct
  misc_feature 1..20: note = Description of Artificial Sequence: Synthetic oligonucleotide
  misc_feature 1..20: note = Target: ANGPTL4; (+) strand; PAM type: NRG; PAM sequence: GAG
  source 1..20: mol_type = other DNA
ctgaggtgggaggatcactt

SEQ ID NO: 10114 - DNA, 20 bp, synthetic construct
  misc_feature 1..20: note = Description of Artificial Sequence: Synthetic oligonucleotide
  misc_feature 1..20: note = Target: ANGPTL4; (+) strand; PAM type: NRG; PAM sequence: TGG
  source 1..20: mol_type = other DNA
gtgggaggatcacttgagcc

SEQ ID NO: 10115 - DNA, 20 bp, synthetic construct
  misc_feature 1..20: note = Description of Artificial Sequence: Synthetic oligonucleotide
  misc_feature 1..20: note = Target: ANGPTL4; (+) strand; PAM type: NRG; PAM sequence: GGG
  source 1..20: mol_type = other DNA
tgggaggatcacttgagcct

SEQ ID NO: 10116 - DNA, 20 bp, synthetic construct
  misc_feature 1..20: note = Description of Artificial Sequence: Synthetic oligonucleotide
  misc_feature 1..20: note = Target: ANGPTL4; (+) strand; PAM type: NRG; PAM sequence: GAG
  source 1..20: mol_type = other DNA
ggaggatcacttgagcctgg

SEQ ID NO: 10117 - DNA, 20 bp, synthetic construct
  misc_feature 1..20: note = Description of Artificial Sequence: Synthetic oligonucleotide
  misc_feature 1..20: note = Target: ANGPTL4; (+) strand; PAM type: NRG; PAM sequence: GAG
  source 1..20: mol_type = other DNA
tcacttgagcctgggagttt

SEQ ID NO: 10118 - DNA, 20 bp, synthetic construct
  misc_feature 1..20: note = Description of Artificial Sequence: Synthetic oligonucleotide
  misc_feature 1..20: note = Target: ANGPTL4; (+) strand; PAM type: NRG; PAM sequence: AGG
  source 1..20: mol_type = other DNA
cacttgagcctgggagtttg

SEQ ID NO: 10119 - DNA, 20 bp, synthetic construct
  misc_feature 1..20: note = Description of Artificial Sequence: Synthetic oligonucleotide
  misc_feature 1..20: note = Target: ANGPTL4; (+) strand; PAM type: NRG; PAM sequence: CGG
  source 1..20: mol_type = other DNA
agcctgggagtttgaggttg

SEQ ID NO: 10120 - DNA, 20 bp, synthetic construct
  misc_feature 1..20: note = Description of Artificial Sequence: Synthetic oligonucleotide
  misc_feature 1..20: note = Target: ANGPTL4; (+) strand; PAM type: NRG; PAM sequence: GAG
  source 1..20: mol_type = other DNA
tgggagtttgaggttgcggt

SEQ ID NO: 10121 - DNA, 20 bp, synthetic construct
  misc_feature 1..20: note = Description of Artificial Sequence: Synthetic oligonucleotide
  misc_feature 1..20: note = Target: ANGPTL4; (+) strand; PAM type: NRG; PAM sequence: CAG
  source 1..20: mol_type = other DNA
gtgattgtgacactgcactc

SEQ ID NO: 10122 - DNA, 20 bp, synthetic construct
  misc_feature 1..20: note = Description of Artificial Sequence: Synthetic oligonucleotide
  misc_feature 1..20: note = Target: ANGPTL4; (+) strand; PAM type: NRG; PAM sequence: TGG
  source 1..20: mol_type = other DNA
tgtgacactgcactccagcc

SEQ ID NO: 10123 - DNA, 20 bp, synthetic construct
  misc_feature 1..20: note = Description of Artificial Sequence: Synthetic oligonucleotide
  misc_feature 1..20: note = Target: ANGPTL4; (+) strand; PAM type: NRG; PAM sequence: GGG
  source 1..20: mol_type = other DNA
gtgacactgcactccagcct

SEQ ID NO: 10124 - DNA, 20 bp, synthetic construct
  misc_feature 1..20: note = Description of Artificial Sequence: Synthetic oligonucleotide
  misc_feature 1..20: note = Target: ANGPTL4; (+) strand; PAM type: NRG; PAM sequence: GAG
  source 1..20: mol_type = other DNA
cactgcactccagcctgggt

SEQ ID NO: 10125 - DNA, 20 bp, synthetic construct
  misc_feature 1..20: note = Description of Artificial Sequence: Synthetic oligonucleotide
  misc_feature 1..20: note = Target: ANGPTL4; (+) strand; PAM type: NRG; PAM sequence: GAG
  source 1..20: mol_type = other DNA
gcactccagcctgggtgagt

SEQ ID NO: 10126 - DNA, 20 bp, synthetic construct
  misc_feature 1..20: note = Description of Artificial Sequence: Synthetic oligonucleotide
  misc_feature 1..20: note = Target: ANGPTL4; (+) strand; PAM type: NRG; PAM sequence: CAG
  source 1..20: mol_type = other DNA
tgggtgagtgagacccatct

SEQ ID NO: 10127 - DNA, 20 bp, synthetic construct
  misc_feature 1..20: note = Description of Artificial Sequence: Synthetic oligonucleotide
  misc_feature 1..20: note = Target: ANGPTL4; (+) strand; PAM type: NRG; PAM sequence: CAG
  source 1..20: mol_type = other DNA
aaaaaaaaaaatacataaaa

SEQ ID NO: 10128 - DNA, 20 bp, synthetic construct
  misc_feature 1..20: note = Description of Artificial Sequence: Synthetic oligonucleotide
  misc_feature 1..20: note = Target: ANGPTL4; (+) strand; PAM type: NRG; PAM sequence: AGG
  source 1..20: mol_type = other DNA
aaaaaaaaaatacataaaac

SEQ ID NO: 10129 - DNA, 20 bp, synthetic construct
  misc_feature 1..20: note = Description of Artificial Sequence: Synthetic oligonucleotide
  misc_feature 1..20: note = Target: ANGPTL4; (+) strand; PAM type: NRG; PAM sequence: GGG
  source 1..20: mol_type = other DNA
aaaaaaaaatacataaaaca

SEQ ID NO: 10130 - DNA, 20 bp, synthetic construct
  misc_feature 1..20: note = Description of Artificial Sequence: Synthetic oligonucleotide
  misc_feature 1..20: note = Target: ANGPTL4; (+) strand; PAM type: NRG; PAM sequence: TGG
  source 1..20: mol_type = other DNA
aaaaatacataaaacagggc

SEQ ID NO: 10131 - DNA, 20 bp, synthetic construct
  misc_feature 1..20: note = Description of Artificial Sequence: Synthetic oligonucleotide
  misc_feature 1..20: note = Target: ANGPTL4; (+) strand; PAM type: NRG; PAM sequence: GGG
  source 1..20: mol_type = other DNA
aaaatacataaaacagggct

SEQ ID NO: 10132 - DNA, 20 bp, synthetic construct
  misc_feature 1..20: note = Description of Artificial Sequence: Synthetic oligonucleotide
  misc_feature 1..20: note = Target: ANGPTL4; (+) strand; PAM type: NRG; PAM sequence: TGG
  source 1..20: mol_type = other DNA
acataaaacagggctgggcg

SEQ ID NO: 10133 - DNA, 20 bp, synthetic construct
  misc_feature 1..20: note = Description of Artificial Sequence: Synthetic oligonucleotide
  misc_feature 1..20: note = Target: ANGPTL4; (+) strand; PAM type: NRG; PAM sequence: TGG
  source 1..20: mol_type = other DNA
taaaacagggctgggcgtgg

SEQ ID NO: 10134 - DNA, 20 bp, synthetic construct
  misc_feature 1..20: note = Description of Artificial Sequence: Synthetic oligonucleotide
  misc_feature 1..20: note = Target: ANGPTL4; (+) strand; PAM type: NRG; PAM sequence: TAG
  source 1..20: mol_type = other DNA
gtggctcatgcctgtaatcc

SEQ ID NO: 10135 - DNA, 20 bp, synthetic construct
  misc_feature 1..20: note = Description of Artificial Sequence: Synthetic oligonucleotide
  misc_feature 1..20: note = Target: ANGPTL4; (+) strand; PAM type: NRG; PAM sequence: TGG
  source 1..20: mol_type = other DNA
tgcctgtaatcctagcactt

SEQ ID NO: 10136 - DNA, 20 bp, synthetic construct
  misc_feature 1..20: note = Description of Artificial Sequence: Synthetic oligonucleotide
  misc_feature 1..20: note = Target: ANGPTL4; (+) strand; PAM type: NRG; PAM sequence: GGG
  source 1..20: mol_type = other DNA
gcctgtaatcctagcacttt

SEQ ID NO: 10137 - DNA, 20 bp, synthetic construct
  misc_feature 1..20: note = Description of Artificial Sequence: Synthetic oligonucleotide
  misc_feature 1..20: note = Target: ANGPTL4; (+) strand; PAM type: NRG; PAM sequence: GAG
  source 1..20: mol_type = other DNA
ctgtaatcctagcactttgg

SEQ ID NO: 10138 - DNA, 20 bp, synthetic construct
  misc_feature 1..20: note = Description of Artificial Sequence: Synthetic oligonucleotide
  misc_feature 1..20: note = Target: ANGPTL4; (+) strand; PAM type: NRG; PAM sequence: AGG
  source 1..20: mol_type = other DNA
tgtaatcctagcactttggg

SEQ ID NO: 10139 - DNA, 20 bp, synthetic construct
  misc_feature 1..20: note = Description of Artificial Sequence: Synthetic oligonucleotide
  misc_feature 1..20: note = Target: ANGPTL4; (+) strand; PAM type: NRG; PAM sequence: GAG
  source 1..20: mol_type = other DNA
tcctagcactttgggaggct

SEQ ID NO: 10140 - DNA, 20 bp, synthetic construct
  misc_feature 1..20: note = Description of Artificial Sequence: Synthetic oligonucleotide
  misc_feature 1..20: note = Target: ANGPTL4; (+) strand; PAM type: NRG; PAM sequence: AGG
  source 1..20: mol_type = other DNA
cctagcactttgggaggctg

SEQ ID NO: 10141 - DNA, 20 bp, synthetic construct
  misc_feature 1..20: note = Description of Artificial Sequence: Synthetic oligonucleotide
  misc_feature 1..20: note = Target: ANGPTL4; (+) strand; PAM type: NRG; PAM sequence: TGG
  source 1..20: mol_type = other DNA
agcactttgggaggctgagg

SEQ ID NO: 10142 - DNA, 20 bp, synthetic construct
  misc_feature 1..20: note = Description of Artificial Sequence: Synthetic oligonucleotide
  misc_feature 1..20: note = Target: ANGPTL4; (+) strand; PAM type: NRG; PAM sequence: TGG
  source 1..20: mol_type = other DNA
actttgggaggctgaggtgg

SEQ ID NO: 10143 - DNA, 20 bp, synthetic construct
  misc_feature 1..20: note = Description of Artificial Sequence: Synthetic oligonucleotide
  misc_feature 1..20: note = Target: ANGPTL4; (+) strand; PAM type: NRG; PAM sequence: TAG
  source 1..20: mol_type = other DNA
tgggaggctgaggtggtgga

SEQ ID NO: 10144 - DNA, 20 bp, synthetic construct
  misc_feature 1..20: note = Description of Artificial Sequence: Synthetic oligonucleotide
  misc_feature 1..20: note = Target: ANGPTL4; (+) strand; PAM type: NRG; PAM sequence: AAG
  source 1..20: mol_type = other DNA
gctgaggtggtggatagcct

SEQ ID NO: 10145 - DNA, 20 bp, synthetic construct
  misc_feature 1..20: note = Description of Artificial Sequence: Synthetic oligonucleotide
  misc_feature 1..20: note = Target: ANGPTL4; (+) strand; PAM type: NRG; PAM sequence: TAG
  source 1..20: mol_type = other DNA
ggtggtggatagcctaagct

SEQ ID NO: 10146 - DNA, 20 bp, synthetic construct
  misc_feature 1..20: note = Description of Artificial Sequence: Synthetic oligonucleotide
  misc_feature 1..20: note = Target: ANGPTL4; (+) strand; PAM type: NRG; PAM sequence: AGG
  source 1..20: mol_type = other DNA
gtggtggatagcctaagctt

SEQ ID NO: 10147 - DNA, 20 bp, synthetic construct
  misc_feature 1..20: note = Description of Artificial Sequence: Synthetic oligonucleotide
  misc_feature 1..20: note = Target: ANGPTL4; (+) strand; PAM type: NRG; PAM sequence: GAG
  source 1..20: mol_type = other DNA
ggtggatagcctaagcttag

SEQ ID NO: 10148 - DNA, 20 bp, synthetic construct
  misc_feature 1..20: note = Description of Artificial Sequence: Synthetic oligonucleotide
  misc_feature 1..20: note = Target: ANGPTL4; (+) strand; PAM type: NRG; PAM sequence: GAG
  source 1..20: mol_type = other DNA
tagcctaagcttaggagttt

SEQ ID NO: 10149 - DNA, 20 bp, synthetic construct
  misc_feature 1..20: note = Description of Artificial Sequence: Synthetic oligonucleotide
  misc_feature 1..20: note = Target: ANGPTL4; (+) strand; PAM type: NRG; PAM sequence: CAG
  source 1..20: mol_type = other DNA
taagcttaggagtttgagac

SEQ ID NO: 10150 - DNA, 20 bp, synthetic construct
  misc_feature 1..20: note = Description of Artificial Sequence: Synthetic oligonucleotide
  misc_feature 1..20: note = Target: ANGPTL4; (+) strand; PAM type: NRG; PAM sequence: TGG
  source 1..20: mol_type = other DNA
ttaggagtttgagaccagcc

SEQ ID NO: 10151 - DNA, 20 bp, synthetic construct
  misc_feature 1..20: note = Description of Artificial Sequence: Synthetic oligonucleotide
  misc_feature 1..20: note = Target: ANGPTL4; (+) strand; PAM type: NRG; PAM sequence: GGG
  source 1..20: mol_type = other DNA
taggagtttgagaccagcct

SEQ ID NO: 10152 - DNA, 20 bp, synthetic construct
  misc_feature 1..20: note = Description of Artificial Sequence: Synthetic oligonucleotide
  misc_feature 1..20: note = Target: ANGPTL4; (+) strand; PAM type: NRG; PAM sequence: TGG
  source 1..20: mol_type = other DNA
tgagaccagcctgggcaaca

SEQ ID NO: 10153 - DNA, 20 bp, synthetic construct
  misc_feature 1..20: note = Description of Artificial Sequence: Synthetic oligonucleotide
  misc_feature 1..20: note = Target: ANGPTL4; (+) strand; PAM type: NRG; PAM sequence: TAG
  source 1..20: mol_type = other DNA
cgaaaccccaccccctctac

SEQ ID NO: 10154 - DNA, 20 bp, synthetic construct
  misc_feature 1..20: note = Description of Artificial Sequence: Synthetic oligonucleotide
  misc_feature 1..20: note = Target: ANGPTL4; (+) strand; PAM type: NRG; PAM sequence: TAG
  source 1..20: mol_type = other DNA
tctactagaatacaaaaaat

SEQ ID NO: 10155 - DNA, 20 bp, synthetic construct
  misc_feature 1..20: note = Description of Artificial Sequence: Synthetic oligonucleotide
  misc_feature 1..20: note = Target: ANGPTL4; (+) strand; PAM type: NRG; PAM sequence: CGG
  source 1..20: mol_type = other DNA
actagaatacaaaaaattag

SEQ ID NO: 10156 - DNA, 20 bp, synthetic construct
  misc_feature 1..20: note = Description of Artificial Sequence: Synthetic oligonucleotide
  misc_feature 1..20: note = Target: ANGPTL4; (+) strand; PAM type: NRG; PAM sequence: GGG
  source 1..20: mol_type = other DNA
ctagaatacaaaaaattagc

SEQ ID NO: 10157 - DNA, 20 bp, synthetic construct
  misc_feature 1..20: note = Description of Artificial Sequence: Synthetic oligonucleotide
  misc_feature 1..20: note = Target: ANGPTL4; (+) strand; PAM type: NRG; PAM sequence: TGG
  source 1..20: mol_type = other DNA
atacaaaaaattagcgggcg

SEQ ID NO: 10158 - DNA, 20 bp, synthetic construct
  misc_feature 1..20: note = Description of Artificial Sequence: Synthetic oligonucleotide
  misc_feature 1..20: note = Target: ANGPTL4; (+) strand; PAM type: NRG; PAM sequence: TGG
  source 1..20: mol_type = other DNA
caaaaaattagcgggcgtgg

SEQ ID NO: 10159 - DNA, 20 bp, synthetic construct
  misc_feature 1..20: note = Description of Artificial Sequence: Synthetic oligonucleotide
  misc_feature 1..20: note = Target: ANGPTL4; (+) strand; PAM type: NRG; PAM sequence: TGG
  source 1..20: mol_type = other DNA
aaaattagcgggcgtggtgg

SEQ ID NO: 10160 - DNA, 20 bp, synthetic construct
  misc_feature 1..20: note = Description of Artificial Sequence: Synthetic oligonucleotide
  misc_feature 1..20: note = Target: ANGPTL4; (+) strand; PAM type: NRG; PAM sequence: GGG
  source 1..20: mol_type = other DNA
aaattagcgggcgtggtggt

SEQ ID NO: 10161 - DNA, 20 bp, synthetic construct
  misc_feature 1..20: note = Description of Artificial Sequence: Synthetic oligonucleotide
  misc_feature 1..20: note = Target: ANGPTL4; (+) strand; PAM type: NRG; PAM sequence: TAG
  source 1..20: mol_type = other DNA
ggcgtggtggtgggcacctg

SEQ ID NO: 10162 - DNA, 20 bp, synthetic construct
  misc_feature 1..20: note = Description of Artificial Sequence: Synthetic oligonucleotide
  misc_feature 1..20: note = Target: ANGPTL4; (+) strand; PAM type: NRG; PAM sequence: CAG
  source 1..20: mol_type = other DNA
gtggtgggcacctgtagtcc

SEQ ID NO: 10163 - DNA, 20 bp, synthetic construct
  misc_feature 1..20: note = Description of Artificial Sequence: Synthetic oligonucleotide
  misc_feature 1..20: note = Target: ANGPTL4; (+) strand; PAM type: NRG; PAM sequence: CAG
  source 1..20: mol_type = other DNA
cacctgtagtcccagctact

SEQ ID NO: 10164 - DNA, 20 bp, synthetic construct
  misc_feature 1..20: note = Description of Artificial Sequence: Synthetic oligonucleotide
  misc_feature 1..20: note = Target: ANGPTL4; (+) strand; PAM type: NRG; PAM sequence: AGG
  source 1..20: mol_type = other DNA
acctgtagtcccagctactc

SEQ ID NO: 10165 - DNA, 20 bp, synthetic construct
  misc_feature 1..20: note = Description of Artificial Sequence: Synthetic oligonucleotide
  misc_feature 1..20: note = Target: ANGPTL4; (+) strand; PAM type: NRG; PAM sequence: GAG
  source 1..20: mol_type = other DNA
ctgtagtcccagctactcag

SEQ ID NO: 10166 - DNA, 20 bp, synthetic construct
  misc_feature 1..20: note = Description of Artificial Sequence: Synthetic oligonucleotide
  misc_feature 1..20: note = Target: ANGPTL4; (+) strand; PAM type: NRG; PAM sequence: AGG
  source 1..20: mol_type = other DNA
tgtagtcccagctactcagg

SEQ ID NO: 10167 - DNA, 20 bp, synthetic construct
  misc_feature 1..20: note = Description of Artificial Sequence: Synthetic oligonucleotide
  misc_feature 1..20: note = Target: ANGPTL4; (+) strand; PAM type: NRG; PAM sequence: GAG
  source 1..20: mol_type = other DNA
tcccagctactcaggaggct

SEQ ID NO: 10168 - DNA, 20 bp, synthetic construct
  misc_feature 1..20: note = Description of Artificial Sequence: Synthetic oligonucleotide
  misc_feature 1..20: note = Target: ANGPTL4; (+) strand; PAM type: NRG; PAM sequence: AGG
  source 1..20: mol_type = other DNA
cccagctactcaggaggctg

SEQ ID NO: 10169 - DNA, 20 bp, synthetic construct
  misc_feature 1..20: note = Description of Artificial Sequence: Synthetic oligonucleotide
  misc_feature 1..20: note = Target: ANGPTL4; (+) strand; PAM type: NRG; PAM sequence: CAG
  source 1..20: mol_type = other DNA
agctactcaggaggctgagg

SEQ ID NO: 10170 - DNA, 20 bp, synthetic construct
  misc_feature 1..20: note = Description of Artificial Sequence: Synthetic oligonucleotide
  misc_feature 1..20: note = Target: ANGPTL4; (+) strand; PAM type: NRG; PAM sequence: AGG
  source 1..20: mol_type = other DNA
gctactcaggaggctgaggc

SEQ ID NO: 10171 - DNA, 20 bp, synthetic construct
  misc_feature 1..20: note = Description of Artificial Sequence: Synthetic oligonucleotide
  misc_feature 1..20: note = Target: ANGPTL4; (+) strand; PAM type: NRG; PAM sequence: GAG
  source 1..20: mol_type = other DNA
tactcaggaggctgaggcag

SEQ ID NO: 10172 - DNA, 20 bp, synthetic construct
  misc_feature 1..20: note = Description of Artificial Sequence: Synthetic oligonucleotide
  misc_feature 1..20: note = Target: ANGPTL4; (+) strand; PAM type: NRG; PAM sequence: TGG
  source 1..20: mol_type = other DNA
aggaggctgaggcaggagaa

SEQ ID NO: 10173 - DNA, 20 bp, synthetic construct
  misc_feature 1..20: note = Description of Artificial Sequence: Synthetic oligonucleotide
  misc_feature 1..20: note = Target: ANGPTL4; (+) strand; PAM type: NRG; PAM sequence: CGG
  source 1..20: mol_type = other DNA
aggctgaggcaggagaatgg

SEQ ID NO: 10174 - DNA, 20 bp, synthetic construct
  misc_feature 1..20: note = Description of Artificial Sequence: Synthetic oligonucleotide
  misc_feature 1..20: note = Target: ANGPTL4; (+) strand; PAM type: NRG; PAM sequence: GGG
  source 1..20: mol_type = other DNA
ggctgaggcaggagaatggc

SEQ ID NO: 10175 - DNA, 20 bp, synthetic construct
  misc_feature 1..20: note = Description of Artificial Sequence: Synthetic oligonucleotide
  misc_feature 1..20: note = Target: ANGPTL4; (+) strand; PAM type: NRG; PAM sequence: TGG
  source 1..20: mol_type = other DNA
gcaggagaatggcgggaacc

SEQ ID NO: 10176 - DNA, 20 bp, synthetic construct
  misc_feature 1..20: note = Description of Artificial Sequence: Synthetic oligonucleotide
  misc_feature 1..20: note = Target: ANGPTL4; (+) strand; PAM type: NRG; PAM sequence: GGG
  source 1..20: mol_type = other DNA
caggagaatggcgggaacct

SEQ ID NO: 10177 - DNA, 20 bp, synthetic construct
  misc_feature 1..20: note = Description of Artificial Sequence: Synthetic oligonucleotide
  misc_feature 1..20: note = Target: ANGPTL4; (+) strand; PAM type: NRG; PAM sequence: GAG
  source 1..20: mol_type = other DNA
ggagaatggcgggaacctgg

SEQ ID NO: 10178 - DNA, 20 bp, synthetic construct
  misc_feature 1..20: note = Description of Artificial Sequence: Synthetic oligonucleotide
  misc_feature 1..20: note = Target: ANGPTL4; (+) strand; PAM type: NRG; PAM sequence: AGG
  source 1..20: mol_type = other DNA
gagaatggcgggaacctggg

SEQ ID NO: 10179 - DNA, 20 bp, synthetic construct
  misc_feature 1..20: note = Description of Artificial Sequence: Synthetic oligonucleotide
  misc_feature 1..20: note = Target: ANGPTL4; (+) strand; PAM type: NRG; PAM sequence: TGG
  source 1..20: mol_type = other DNA
aatggcgggaacctgggagg

SEQ ID NO: 10180 - DNA, 20 bp, synthetic construct
  misc_feature 1..20: note = Description of Artificial Sequence: Synthetic oligonucleotide
  misc_feature 1..20: note = Target: ANGPTL4; (+) strand; PAM type: NRG; PAM sequence: GAG
  source 1..20: mol_type = other DNA
tggcgggaacctgggaggtg

SEQ ID NO: 10181 - DNA, 20 bp, synthetic construct
  misc_feature 1..20: note = Description of Artificial Sequence: Synthetic oligonucleotide
  misc_feature 1..20: note = Target: ANGPTL4; (+) strand; PAM type: NRG; PAM sequence: CAG
  source 1..20: mol_type = other DNA
aacctgggaggtggagcttg

SEQ ID NO: 10182 - DNA, 20 bp, synthetic construct
  misc_feature 1..20: note = Description of Artificial Sequence: Synthetic oligonucleotide
  misc_feature 1..20: note = Target: ANGPTL4; (+) strand; PAM type: NRG; PAM sequence: GAG
  source 1..20: mol_type = other DNA
tgggaggtggagcttgcagt

SEQ ID NO: 10183 - DNA, 20 bp, synthetic construct
  misc_feature 1..20: note = Description of Artificial Sequence: Synthetic oligonucleotide
  misc_feature 1..20: note = Target: ANGPTL4; (+) strand; PAM type: NRG; PAM sequence: GAG
  source 1..20: mol_type = other DNA
ggtggagcttgcagtgagcc

SEQ ID NO: 10184 - DNA, 20 bp, synthetic construct
  misc_feature 1..20: note = Description of Artificial Sequence: Synthetic oligonucleotide
  misc_feature 1..20: note = Target: ANGPTL4; (+) strand; PAM type: NRG; PAM sequence: GAG
  source 1..20: mol_type = other DNA
agcttgcagtgagccgagat

SEQ ID NO: 10185 - DNA, 20 bp, synthetic construct
  misc_feature 1..20: note = Description of Artificial Sequence: Synthetic oligonucleotide
  misc_feature 1..20: note = Target: ANGPTL4; (+) strand; PAM type: NRG; PAM sequence: AGG
  source 1..20: mol_type = other DNA
gcttgcagtgagccgagatg

SEQ ID NO: 10186 - DNA, 20 bp, synthetic construct
  misc_feature 1..20: note = Description of Artificial Sequence: Synthetic oligonucleotide
  misc_feature 1..20: note = Target: ANGPTL4; (+) strand; PAM type: NRG; PAM sequence: CAG
  source 1..20: mol_type = other DNA
gagatgaggccactgcactc

SEQ ID NO: 10187 - DNA, 20 bp, synthetic construct
  misc_feature 1..20: note = Description of Artificial Sequence: Synthetic oligonucleotide
  misc_feature 1..20: note = Target: ANGPTL4; (+) strand; PAM type: NRG; PAM sequence: TGG
  source 1..20: mol_type = other DNA
gaggccactgcactccagcc

SEQ ID NO: 10188 - DNA, 20 bp, synthetic construct
  misc_feature 1..20: note = Description of Artificial Sequence: Synthetic oligonucleotide
  misc_feature 1..20: note = Target: ANGPTL4; (+) strand; PAM type: NRG; PAM sequence: GGG
  source 1..20: mol_type = other DNA
aggccactgcactccagcct

SEQ ID NO: 10189 - DNA, 20 bp, synthetic construct
  misc_feature 1..20: note = Description of Artificial Sequence: Synthetic oligonucleotide
  misc_feature 1..20: note = Target: ANGPTL4; (+) strand; PAM type: NRG; PAM sequence: CAG
  source 1..20: mol_type = other DNA
ctgcactccagcctgggcaa

SEQ ID NO: 10190 - DNA, 20 bp, synthetic construct
  misc_feature 1..20: note = Description of Artificial Sequence: Synthetic oligonucleotide
  misc_feature 1..20: note = Target: ANGPTL4; (+) strand; PAM type: NRG; PAM sequence: GAG
  source 1..20: mol_type = other DNA
gcactccagcctgggcaaca

SEQ ID NO: 10191 - DNA, 20 bp, synthetic construct
  misc_feature 1..20: note = Description of Artificial Sequence: Synthetic oligonucleotide
  misc_feature 1..20: note = Target: ANGPTL4; (+) strand; PAM type: NRG; PAM sequence: AAG
  source 1..20: mol_type = other DNA
tccagcctgggcaacagagc

SEQ ID NO: 10192 - DNA, 20 bp, synthetic construct
  misc_feature 1..20: note = Description of Artificial Sequence: Synthetic oligonucleotide
  misc_feature 1..20: note = Target: ANGPTL4; (+) strand; PAM type: NRG; PAM sequence: AAG
  source 1..20: mol_type = other DNA
tcaaaaaaaaaaaaaaaaaa

SEQ ID NO: 10193 - DNA, 20 bp, synthetic construct
  misc_feature 1..20: note = Description of Artificial Sequence: Synthetic oligonucleotide
  misc_feature 1..20: note = Target: ANGPTL4; (+) strand; PAM type: NRG; PAM sequence: AGG
  source 1..20: mol_type = other DNA
caaaaaaaaaaaaaaaaaaa

SEQ ID NO: 10194 - DNA, 20 bp, synthetic construct
  misc_feature 1..20: note = Description of Artificial Sequence: Synthetic oligonucleotide
  misc_feature 1..20: note = Target: ANGPTL4; (+) strand; PAM type: NRG; PAM sequence: TAG
  source 1..20: mol_type = other DNA
aaaaaaaaaaaaaaaaaggc

SEQ ID NO: 10195 - DNA, 20 bp, synthetic construct
  misc_feature 1..20: note = Description of Artificial Sequence: Synthetic oligonucleotide
  misc_feature 1..20: note = Target: ANGPTL4; (+) strand; PAM type: NRG; PAM sequence: AGG
  source 1..20: mol_type = other DNA
aaaaaaaaaaaaaaaaggct

SEQ ID NO: 10196 - DNA, 20 bp, synthetic construct
  misc_feature 1..20: note = Description of Artificial Sequence: Synthetic oligonucleotide
  misc_feature 1..20: note = Target: ANGPTL4; (+) strand; PAM type: NRG; PAM sequence: CAG
  source 1..20: mol_type = other DNA
aaaaaaaaaaaaggctaggc

SEQ ID NO: 10197 - DNA, 20 bp, synthetic construct
  misc_feature 1..20: note = Description of Artificial Sequence: Synthetic oligonucleotide
  misc_feature 1..20: note = Target: ANGPTL4; (+) strand; PAM type: NRG; PAM sequence: AGG
  source 1..20: mol_type = other DNA
aaaaaaaaaaaggctaggcc

SEQ ID NO: 10198 - DNA, 20 bp, synthetic construct
  misc_feature 1..20: note = Description of Artificial Sequence: Synthetic oligonucleotide
  misc_feature 1..20: note = Target: ANGPTL4; (+) strand; PAM type: NRG; PAM sequence: CAG
  source 1..20: mol_type = other DNA
aaaaaaggctaggccaggca

SEQ ID NO: 10199 - DNA, 20 bp, synthetic construct
  misc_feature 1..20: note = Description of Artificial Sequence: Synthetic oligonucleotide
  misc_feature 1..20: note = Target: ANGPTL4; (+) strand; PAM type: NRG; PAM sequence: TGG
  source 1..20: mol_type = other DNA
aaaggctaggccaggcacag

SEQ ID NO: 10200 - DNA, 20 bp, synthetic construct
  misc_feature 1..20: note = Description of Artificial Sequence: Synthetic oligonucleotide
  misc_feature 1..20: note = Target: ANGPTL4; (+) strand; PAM type: NRG; PAM sequence: CAG
  source 1..20: mol_type = other DNA
gtggctcacacctgtaatcc

SEQ ID NO: 10201 - DNA, 20 bp, synthetic construct
  misc_feature 1..20: note = Description of Artificial Sequence: Synthetic oligonucleotide
  misc_feature 1..20: note = Target: ANGPTL4; (+) strand; PAM type: NRG; PAM sequence: TGG
  source 1..20: mol_type = other DNA
cacctgtaatcccagcacgt

SEQ ID NO: 10202 - DNA, 20 bp, synthetic construct
  misc_feature 1..20: note = Description of Artificial Sequence: Synthetic oligonucleotide
  misc_feature 1..20: note = Target: ANGPTL4; (+) strand; PAM type: NRG; PAM sequence: GGG
  source 1..20: mol_type = other DNA
acctgtaatcccagcacgtt

SEQ ID NO: 10203 - DNA, 20 bp, synthetic construct
  misc_feature 1..20: note = Description of Artificial Sequence: Synthetic oligonucleotide
  misc_feature 1..20: note = Target: ANGPTL4; (+) strand; PAM type: NRG; PAM sequence: GAG
  source 1..20: mol_type = other DNA
ctgtaatcccagcacgttgg

SEQ ID NO: 10204 - DNA, 20 bp, synthetic construct
  misc_feature 1..20: note = Description of Artificial Sequence: Synthetic oligonucleotide
  misc_feature 1..20: note = Target: ANGPTL4; (+) strand; PAM type: NRG; PAM sequence: AGG
  source 1..20: mol_type = other DNA
tgtaatcccagcacgttggg

SEQ ID NO: 10205 - DNA, 20 bp, synthetic construct
  misc_feature 1..20: note = Description of Artificial Sequence: Synthetic oligonucleotide
  misc_feature 1..20: note = Target: ANGPTL4; (+) strand; PAM type: NRG; PAM sequence: GAG
  source 1..20: mol_type = other DNA
tcccagcacgttgggaggcc

SEQ ID NO: 10206 - DNA, 20 bp, synthetic construct
  misc_feature 1..20: note = Description of Artificial Sequence: Synthetic oligonucleotide
  misc_feature 1..20: note = Target: ANGPTL4; (+) strand; PAM type: NRG; PAM sequence: CAG
  source 1..20: mol_type = other DNA
agcacgttgggaggccgaga

SEQ ID NO: 10207 - DNA, 20 bp, synthetic construct
  misc_feature 1..20: note = Description of Artificial Sequence: Synthetic oligonucleotide
  misc_feature 1..20: note = Target: ANGPTL4; (+) strand; PAM type: NRG; PAM sequence: AGG
  source 1..20: mol_type = other DNA
gcacgttgggaggccgagac

SEQ ID NO: 10208 - DNA, 20 bp, synthetic construct
  misc_feature 1..20: note = Description of Artificial Sequence: Synthetic oligonucleotide
  misc_feature 1..20: note = Target: ANGPTL4; (+) strand; PAM type: NRG; PAM sequence: TGG
  source 1..20: mol_type = other DNA
cgttgggaggccgagacagg

SEQ ID NO: 10209 - DNA, 20 bp, synthetic construct
  misc_feature 1..20: note = Description of Artificial Sequence: Synthetic oligonucleotide
  misc_feature 1..20: note = Target: ANGPTL4; (+) strand; PAM type: NRG; PAM sequence: GAG
  source 1..20: mol_type = other DNA
ccgagacaggtggatcacct

SEQ ID NO: 10210 - DNA, 20 bp, synthetic construct
  misc_feature 1..20: note = Description of Artificial Sequence: Synthetic oligonucleotide
  misc_feature 1..20: note = Target: ANGPTL4; (+) strand; PAM type: NRG; PAM sequence: AGG
  source 1..20: mol_type = other DNA
cgagacaggtggatcacctg

SEQ ID NO: 10211 - DNA, 20 bp, synthetic construct
  misc_feature 1..20: note = Description of Artificial Sequence: Synthetic oligonucleotide
  misc_feature 1..20: note = Target: ANGPTL4; (+) strand; PAM type: NRG; PAM sequence: CAG
  source 1..20: mol_type = other DNA
acaggtggatcacctgaggt

SEQ ID NO: 10212 - DNA, 20 bp, synthetic construct
  misc_feature 1..20: note = Description of Artificial Sequence: Synthetic oligonucleotide
  misc_feature 1..20: note = Target: ANGPTL4; (+) strand; PAM type: NRG; PAM sequence: AGG
  source 1..20: mol_type = other DNA
caggtggatcacctgaggtc

SEQ ID NO: 10213 - DNA, 20 bp, synthetic construct
  misc_feature 1..20: note = Description of Artificial Sequence: Synthetic oligonucleotide
  misc_feature 1..20: note = Target: ANGPTL4; (+) strand; PAM type: NRG; PAM sequence: GAG
  source 1..20: mol_type = other DNA
tcacctgaggtcaggaattt

SEQ ID NO: 10214 - DNA, 20 bp, synthetic construct
  misc_feature 1..20: note = Description of Artificial Sequence: Synthetic oligonucleotide
  misc_feature 1..20: note = Target: ANGPTL4; (+) strand; PAM type: NRG; PAM sequence: CAG
  source 1..20: mol_type = other DNA
tgaggtcaggaatttgagac

SEQ ID NO: 10215 - DNA, 20 bp, synthetic construct
  misc_feature 1..20: note = Description of Artificial Sequence: Synthetic oligonucleotide
  misc_feature 1..20: note = Target: ANGPTL4; (+) strand; PAM type: NRG; PAM sequence: CAG
  source 1..20: mol_type = other DNA
ggtcaggaatttgagaccag

SEQ ID NO: 10216 - DNA, 20 bp, synthetic construct
  misc_feature 1..20: note = Description of Artificial Sequence: Synthetic oligonucleotide
  misc_feature 1..20: note = Target: ANGPTL4; (+) strand; PAM type: NRG; PAM sequence: GAG
  source 1..20: mol_type = other DNA
tcaggaatttgagaccagca

SEQ ID NO: 10217 - DNA, 20 bp, synthetic construct
  misc_feature 1..20: note = Description of Artificial Sequence: Synthetic oligonucleotide
  misc_feature 1..20: note = Target: ANGPTL4; (+) strand; PAM type: NRG; PAM sequence: TAG
  source 1..20: mol_type = other DNA
tgagaccagcagagccaaca

SEQ ID NO: 10218 - DNA, 20 bp, synthetic construct
  misc_feature 1..20: note = Description of Artificial Sequence: Synthetic oligonucleotide
  misc_feature 1..20: note = Target: ANGPTL4; (+) strand; PAM type: NRG; PAM sequence: TAG
  source 1..20: mol_type = other DNA
gcactaaaaatacaaaaaat

SEQ ID NO: 10219 - DNA, 20 bp, synthetic construct
  misc_feature 1..20: note = Description of Artificial Sequence: Synthetic oligonucleotide
  misc_feature 1..20: note = Target: ANGPTL4; (+) strand; PAM type: NRG; PAM sequence: CAG
  source 1..20: mol_type = other DNA
taaaaatacaaaaaattagt

SEQ ID NO: 10220 - DNA, 20 bp, synthetic construct
  misc_feature 1..20: note = Description of Artificial Sequence: Synthetic oligonucleotide
  misc_feature 1..20: note = Target: ANGPTL4; (+) strand; PAM type: NRG; PAM sequence: AGG
  source 1..20: mol_type = other DNA
aaaaatacaaaaaattagtc

SEQ ID NO: 10221 - DNA, 20 bp, synthetic construct
  misc_feature 1..20: note = Description of Artificial Sequence: Synthetic oligonucleotide
  misc_feature 1..20: note = Target: ANGPTL4; (+) strand; PAM type: NRG; PAM sequence: TGG
  source 1..20: mol_type = other DNA
tacaaaaaattagtcaggtg

SEQ ID NO: 10222 - DNA, 20 bp, synthetic construct
  misc_feature 1..20: note = Description of Artificial Sequence: Synthetic oligonucleotide
  misc_feature 1..20: note = Target: ANGPTL4; (+) strand; PAM type: NRG; PAM sequence: TGG
  source 1..20: mol_type = other DNA
aaaaaattagtcaggtgtgg

SEQ ID NO: 10223 - DNA, 20 bp, synthetic construct
  misc_feature 1..20: note = Description of Artificial Sequence: Synthetic oligonucleotide
  misc_feature 1..20: note = Target: ANGPTL4; (+) strand; PAM type: NRG; PAM sequence: CGG
  source 1..20: mol_type = other DNA
cacctgtaatccccgctact

SEQ ID NO: 10224 - DNA, 20 bp, synthetic construct
  misc_feature 1..20: note = Description of Artificial Sequence: Synthetic oligonucleotide
  misc_feature 1..20: note = Target: ANGPTL4; (+) strand; PAM type: NRG; PAM sequence: GGG
  source 1..20: mol_type = other DNA
acctgtaatccccgctactc

SEQ ID NO: 10225 - DNA, 20 bp, synthetic construct
  misc_feature 1..20: note = Description of Artificial Sequence: Synthetic oligonucleotide
  misc_feature 1..20: note = Target: ANGPTL4; (+) strand; PAM type: NRG; PAM sequence: GAG
  source 1..20: mol_type = other DNA
ctgtaatccccgctactcgg

SEQ ID NO: 10226 - DNA, 20 bp, synthetic construct
  misc_feature 1..20: note = Description of Artificial Sequence: Synthetic oligonucleotide
  misc_feature 1..20: note = Target: ANGPTL4; (+) strand; PAM type: NRG; PAM sequence: AGG
  source 1..20: mol_type = other DNA
tgtaatccccgctactcggg

SEQ ID NO: 10227 - DNA, 20 bp, synthetic construct
  misc_feature 1..20: note = Description of Artificial Sequence: Synthetic oligonucleotide
  misc_feature 1..20: note = Target: ANGPTL4; (+) strand; PAM type: NRG; PAM sequence: GAG
  source 1..20: mol_type = other DNA
tccccgctactcgggaggct

SEQ ID NO: 10228 - DNA, 20 bp, synthetic construct
  misc_feature 1..20: note = Description of Artificial Sequence: Synthetic oligonucleotide
  misc_feature 1..20: note = Target: ANGPTL4; (+) strand; PAM type: NRG; PAM sequence: AGG
  source 1..20: mol_type = other DNA
ccccgctactcgggaggctg

SEQ ID NO: 10229 - DNA, 20 bp, synthetic construct
  misc_feature 1..20: note = Description of Artificial Sequence: Synthetic oligonucleotide
  misc_feature 1..20: note = Target: ANGPTL4; (+) strand; PAM type: NRG; PAM sequence: TGG
  source 1..20: mol_type = other DNA
gctactcgggaggctgaggc

SEQ ID NO: 10230 - DNA, 20 bp, synthetic construct
  misc_feature 1..20: note = Description of Artificial Sequence: Synthetic oligonucleotide
  misc_feature 1..20: note = Target: ANGPTL4; (+) strand; PAM type: NRG; PAM sequence: GAG
  source 1..20: mol_type = other DNA
tactcgggaggctgaggctg

SEQ ID NO: 10231 - DNA, 20 bp, synthetic construct
  misc_feature 1..20: note = Description of Artificial Sequence: Synthetic oligonucleotide
  misc_feature 1..20: note = Target: ANGPTL4; (+) strand; PAM type: NRG; PAM sequence: TGG
  source 1..20: mol_type = other DNA
gctggagaatcgcttgaacc

SEQ ID NO: 10232 - DNA, 20 bp, synthetic construct
  misc_feature 1..20: note = Description of Artificial Sequence: Synthetic oligonucleotide
  misc_feature 1..20: note = Target: ANGPTL4; (+) strand; PAM type: NRG; PAM sequence: GGG
  source 1..20: mol_type = other DNA
ctggagaatcgcttgaacct

SEQ ID NO: 10233 - DNA, 20 bp, synthetic construct
  misc_feature 1..20: note = Description of Artificial Sequence: Synthetic oligonucleotide
  misc_feature 1..20: note = Target: ANGPTL4; (+) strand; PAM type: NRG; PAM sequence: GAG
  source 1..20: mol_type = other DNA
ggagaatcgcttgaacctgg

SEQ ID NO: 10234 - DNA, 20 bp, synthetic construct
  misc_feature 1..20: note = Description of Artificial Sequence: Synthetic oligonucleotide
  misc_feature 1..20: note = Target: ANGPTL4; (+) strand; PAM type: NRG; PAM sequence: AGG
  source 1..20: mol_type = other DNA
gagaatcgcttgaacctggg

SEQ ID NO: 10235 - DNA, 20 bp, synthetic construct
  misc_feature 1..20: note = Description of Artificial Sequence: Synthetic oligonucleotide
  misc_feature 1..20: note = Target: ANGPTL4; (+) strand; PAM type: NRG; PAM sequence: CAG
  source 1..20: mol_type = other DNA
aatcgcttgaacctgggagg

SEQ ID NO: 10236 - DNA, 20 bp, synthetic construct
  misc_feature 1..20: note = Description of Artificial Sequence: Synthetic oligonucleotide
  misc_feature 1..20: note = Target: ANGPTL4; (+) strand; PAM type: NRG; PAM sequence: GAG
  source 1..20: mol_type = other DNA
tcgcttgaacctgggaggca

SEQ ID NO: 10237 - DNA, 20 bp, synthetic construct
  misc_feature 1..20: note = Description of Artificial Sequence: Synthetic oligonucleotide
  misc_feature 1..20: note = Target: ANGPTL4; (+) strand; PAM type: NRG; PAM sequence: AGG
  source 1..20: mol_type = other DNA
cgcttgaacctgggaggcag

SEQ ID NO: 10238 - DNA, 20 bp, synthetic construct
  misc_feature 1..20: note = Description of Artificial Sequence: Synthetic oligonucleotide
  misc_feature 1..20: note = Target: ANGPTL4; (+) strand; PAM type: NRG; PAM sequence: CAG
  source 1..20: mol_type = other DNA
aacctgggaggcagaggttg

SEQ ID NO: 10239 - DNA, 20 bp, synthetic construct
  misc_feature 1..20: note = Description of Artificial Sequence: Synthetic oligonucleotide
  misc_feature 1..20: note = Target: ANGPTL4; (+) strand; PAM type: NRG; PAM sequence: GAG
  source 1..20: mol_type = other DNA
tgggaggcagaggttgcagt

SEQ ID NO: 10240 - DNA, 20 bp, synthetic construct
  misc_feature 1..20: note = Description of Artificial Sequence: Synthetic oligonucleotide
  misc_feature 1..20: note = Target: ANGPTL4; (+) strand; PAM type: NRG; PAM sequence: CGG
  source 1..20: mol_type = other DNA
gaggcagaggttgcagtgag

SEQ ID NO: 10241 - DNA, 20 bp, synthetic construct
  misc_feature 1..20: note = Description of Artificial Sequence: Synthetic oligonucleotide
  misc_feature 1..20: note = Target: ANGPTL4; (+) strand; PAM type: NRG; PAM sequence: GAG
  source 1..20: mol_type = other DNA
ggcagaggttgcagtgagcg

SEQ ID NO: 10242 - DNA, 20 bp, synthetic construct
  misc_feature 1..20: note = Description of Artificial Sequence: Synthetic oligonucleotide
  misc_feature 1..20: note = Target: ANGPTL4; (+) strand; PAM type: NRG; PAM sequence: CAG
  source 1..20: mol_type = other DNA
gagattgcgccgttgcactc

SEQ ID NO: 10243 - DNA, 20 bp, synthetic construct
  misc_feature 1..20: note = Description of Artificial Sequence: Synthetic oligonucleotide
  misc_feature 1..20: note = Target: ANGPTL4; (+) strand; PAM type: NRG; PAM sequence: TGG
  source 1..20: mol_type = other DNA
tgcgccgttgcactccagcc

SEQ ID NO: 10244 - DNA, 20 bp, synthetic construct
  misc_feature 1..20: note = Description of Artificial Sequence: Synthetic oligonucleotide
  misc_feature 1..20: note = Target: ANGPTL4; (+) strand; PAM type: NRG; PAM sequence: GGG
  source 1..20: mol_type = other DNA
gcgccgttgcactccagcct

SEQ ID NO: 10245 - DNA, 20 bp, synthetic construct
  misc_feature 1..20: note = Description of Artificial Sequence: Synthetic oligonucleotide
  misc_feature 1..20: note = Target: ANGPTL4; (+) strand; PAM type: NRG; PAM sequence: AAG
  source 1..20: mol_type = other DNA
tgcactccagcctgggcgac

SEQ ID NO: 10246 - DNA, 20 bp, synthetic construct
  misc_feature 1..20: note = Description of Artificial Sequence: Synthetic oligonucleotide
  misc_feature 1..20: note = Target: ANGPTL4; (+) strand; PAM type: NRG; PAM sequence: GAG
  source 1..20: mol_type = other DNA
cactccagcctgggcgacaa

SEQ ID NO: 10247 - DNA, 20 bp, synthetic construct
  misc_feature 1..20: note = Description of Artificial Sequence: Synthetic oligonucleotide
  misc_feature 1..20: note = Target: ANGPTL4; (+) strand; PAM type: NRG; PAM sequence: AGG
  source 1..20: mol_type = other DNA
actccagcctgggcgacaag

SEQ ID NO: 10248 - DNA, 20 bp, synthetic construct
  misc_feature 1..20: note = Description of Artificial Sequence: Synthetic oligonucleotide
  misc_feature 1..20: note = Target: ANGPTL4; (+) strand; PAM type: NRG; PAM sequence: GGG
  source 1..20: mol_type = other DNA
ctccagcctgggcgacaaga

SEQ ID NO: 10249 - DNA, 20 bp, synthetic construct
  misc_feature 1..20: note = Description of Artificial Sequence: Synthetic oligonucleotide
  misc_feature 1..20: note = Target: ANGPTL4; (+) strand; PAM type: NRG; PAM sequence: TAG
  source 1..20: mol_type = other DNA
taaataaataaaataaaaaa

SEQ ID NO: 10250 - DNA, 20 bp, synthetic construct
  misc_feature 1..20: note = Description of Artificial Sequence: Synthetic oligonucleotide
  misc_feature 1..20: note = Target: ANGPTL4; (+) strand; PAM type: NRG; PAM sequence: AGG
  source 1..20: mol_type = other DNA
aaataaataaaataaaaaat

SEQ ID NO: 10251 - DNA, 20 bp, synthetic construct
  misc_feature 1..20: note = Description of Artificial Sequence: Synthetic oligonucleotide
  misc_feature 1..20: note = Target: ANGPTL4; (+) strand; PAM type: NRG; PAM sequence: TGG
  source 1..20: mol_type = other DNA
aaataaaataaaaaataggc

SEQ ID NO: 10252 - DNA, 20 bp, synthetic construct
  misc_feature 1..20: note = Description of Artificial Sequence: Synthetic oligonucleotide
  misc_feature 1..20: note = Target: ANGPTL4; (+) strand; PAM type: NRG; PAM sequence: GGG
  source 1..20: mol_type = other DNA
aataaaataaaaaataggct

SEQ ID NO: 10253 - DNA, 20 bp, synthetic construct
  misc_feature 1..20: note = Description of Artificial Sequence: Synthetic oligonucleotide
  misc_feature 1..20: note = Target: ANGPTL4; (+) strand; PAM type: NRG; PAM sequence: CGG
  source 1..20: mol_type = other DNA
aataaaaaataggctgggcg

SEQ ID NO: 10254 - DNA, 20 bp, synthetic construct
  misc_feature 1..20: note = Description of Artificial Sequence: Synthetic oligonucleotide
  misc_feature 1..20: note = Target: ANGPTL4; (+) strand; PAM type: NRG; PAM sequence: TGG
  source 1..20: mol_type = other DNA
aaaaaataggctgggcgcgg

SEQ ID NO: 10255 - DNA, 20 bp, synthetic construct
  misc_feature 1..20: note = Description of Artificial Sequence: Synthetic oligonucleotide
  misc_feature 1..20: note = Target: ANGPTL4; (+) strand; PAM type: NRG; PAM sequence: CAG
  source 1..20: mol_type = other DNA
gtggctcatgcctgtaatcc

SEQ ID NO: 10256 - DNA, 20 bp, synthetic construct
  misc_feature 1..20: note = Description of Artificial Sequence: Synthetic oligonucleotide
  misc_feature 1..20: note = Target: ANGPTL4; (+) strand; PAM type: NRG; PAM sequence: TGG
  source 1..20: mol_type = other DNA
tgcctgtaatcccagcactt

SEQ ID NO: 10257 - DNA, 20 bp, synthetic construct
  misc_feature 1..20: note = Description of Artificial Sequence: Synthetic oligonucleotide
  misc_feature 1..20: note = Target: ANGPTL4; (+) strand; PAM type: NRG; PAM sequence: GGG
  source 1..20: mol_type = other DNA
gcctgtaatcccagcacttt

SEQ ID NO: 10258 - DNA, 20 bp, synthetic construct
  misc_feature 1..20: note = Description of Artificial Sequence: Synthetic oligonucleotide
  misc_feature 1..20: note = Target: ANGPTL4; (+) strand; PAM type: NRG; PAM sequence: GAG
  source 1..20: mol_type = other DNA
ctgtaatcccagcactttgg

SEQ ID NO: 10259 - DNA, 20 bp, synthetic construct
  misc_feature 1..20: note = Description of Artificial Sequence: Synthetic oligonucleotide
  misc_feature 1..20: note = Target: ANGPTL4; (+) strand; PAM type: NRG; PAM sequence: AGG
  source 1..20: mol_type = other DNA
tgtaatcccagcactttggg

SEQ ID NO: 10260 - DNA, 20 bp, synthetic construct
  misc_feature 1..20: note = Description of Artificial Sequence: Synthetic oligonucleotide
  misc_feature 1..20: note = Target: ANGPTL4; (+) strand; PAM type: NRG; PAM sequence: AAG
  source 1..20: mol_type = other DNA
cccagcactttgggaggccg

SEQ ID NO: 10261 - DNA, 20 bp, synthetic construct
  misc_feature 1..20: note = Description of Artificial Sequence: Synthetic oligonucleotide
  misc_feature 1..20: note = Target: ANGPTL4; (+) strand; PAM type: NRG; PAM sequence: CGG
  source 1..20: mol_type = other DNA
agcactttgggaggccgaag

SEQ ID NO: 10262 - DNA, 20 bp, synthetic construct
  misc_feature 1..20: note = Description of Artificial Sequence: Synthetic oligonucleotide
  misc_feature 1..20: note = Target: ANGPTL4; (+) strand; PAM type: NRG; PAM sequence: GGG
  source 1..20: mol_type = other DNA
gcactttgggaggccgaagc

SEQ ID NO: 10263 - DNA, 20 bp, synthetic construct
  misc_feature 1..20: note = Description of Artificial Sequence: Synthetic oligonucleotide
  misc_feature 1..20: note = Target: ANGPTL4; (+) strand; PAM type: NRG; PAM sequence: CGG
  source 1..20: mol_type = other DNA
ctttgggaggccgaagcggg

SEQ ID NO: 10264 - DNA, 20 bp, synthetic construct
  misc_feature 1..20: note = Description of Artificial Sequence: Synthetic oligonucleotide
  misc_feature 1..20: note = Target: ANGPTL4; (+) strand; PAM type: NRG; PAM sequence: GAG
  source 1..20: mol_type = other DNA
ggccgaagcgggcggatcac

SEQ ID NO: 10265 - DNA, 20 bp, synthetic construct
  misc_feature 1..20: note = Description of Artificial Sequence: Synthetic oligonucleotide
  misc_feature 1..20: note = Target: ANGPTL4; (+) strand; PAM type: NRG; PAM sequence: AGG
  source 1..20: mol_type = other DNA
gccgaagcgggcggatcacg

SEQ ID NO: 10266 - DNA, 20 bp, synthetic construct
  misc_feature 1..20: note = Description of Artificial Sequence: Synthetic oligonucleotide
  misc_feature 1..20: note = Target: ANGPTL4; (+) strand; PAM type: NRG; PAM sequence: CAG
  source 1..20: mol_type = other DNA
aagcgggcggatcacgaggt

SEQ ID NO: 10267 - DNA, 20 bp, synthetic construct
  misc_feature 1..20: note = Description of Artificial Sequence: Synthetic oligonucleotide
  misc_feature 1..20: note = Target: ANGPTL4; (+) strand; PAM type: NRG; PAM sequence: AGG
  source 1..20: mol_type = other DNA
agcgggcggatcacgaggtc

SEQ ID NO: 10268 - DNA, 20 bp, synthetic construct
  misc_feature 1..20: note = Description of Artificial Sequence: Synthetic oligonucleotide
  misc_feature 1..20: note = Target: ANGPTL4; (+) strand; PAM type: NRG; PAM sequence: GAG
  source 1..20: mol_type = other DNA
cgggcggatcacgaggtcag

SEQ ID NO: 10269 - DNA, 20 bp, synthetic construct
  misc_feature 1..20: note = Description of Artificial Sequence: Synthetic oligonucleotide
  misc_feature 1..20: note = Target: ANGPTL4; (+) strand; PAM type: NRG; PAM sequence: GAG
  source 1..20: mol_type = other DNA
gatcacgaggtcaggagatc

SEQ ID NO: 10270 - DNA, 20 bp, synthetic construct
  misc_feature 1..20: note = Description of Artificial Sequence: Synthetic oligonucleotide
  misc_feature 1..20: note = Target: ANGPTL4; (+) strand; PAM type: NRG; PAM sequence: TGG
  source 1..20: mol_type = other DNA
tcaggagatcgagaccatcc

SEQ ID NO: 10271 - DNA, 20 bp, synthetic construct
  misc_feature 1..20: note = Description of Artificial Sequence: Synthetic oligonucleotide
  misc_feature 1..20: note = Target: ANGPTL4; (+) strand; PAM type: NRG; PAM sequence: TGG
  source 1..20: mol_type = other DNA
cgagaccatcctggctaaca

SEQ ID NO: 10272 - DNA, 20 bp, synthetic construct
  misc_feature 1..20: note = Description of Artificial Sequence: Synthetic oligonucleotide
  misc_feature 1..20: note = Target: ANGPTL4; (+) strand; PAM type: NRG; PAM sequence: TAG
  source 1..20: mol_type = other DNA
ctattaaaaatacaaaaaat

SEQ ID NO: 10273 - DNA, 20 bp, synthetic construct
  misc_feature 1..20: note = Description of Artificial Sequence: Synthetic oligonucleotide
  misc_feature 1..20: note = Target: ANGPTL4; (+) strand; PAM type: NRG; PAM sequence: TGG
  source 1..20: mol_type = other DNA
taaaaatacaaaaaattagc

SEQ ID NO: 10274 - DNA, 20 bp, synthetic construct
  misc_feature 1..20: note = Description of Artificial Sequence: Synthetic oligonucleotide
  misc_feature 1..20: note = Target: ANGPTL4; (+) strand; PAM type: NRG; PAM sequence: GGG
  source 1..20: mol_type = other DNA
aaaaatacaaaaaattagct

SEQ ID NO: 10275 - DNA, 20 bp, synthetic construct
  misc_feature 1..20: note = Description of Artificial Sequence: Synthetic oligonucleotide
  misc_feature 1..20: note = Target: ANGPTL4; (+) strand; PAM type: NRG; PAM sequence: TGG
  source 1..20: mol_type = other DNA
tacaaaaaattagctgggca

SEQ ID NO: 10276 - DNA, 20 bp, synthetic construct
  misc_feature 1..20: note = Description of Artificial Sequence: Synthetic oligonucleotide
  misc_feature 1..20: note = Target: ANGPTL4; (+) strand; PAM type: NRG; PAM sequence: TGG
  source 1..20: mol_type = other DNA
aaaaaattagctgggcatgg

SEQ ID NO: 10277 - DNA, 20 bp, synthetic construct
  misc_feature 1..20: note = Description of Artificial Sequence: Synthetic oligonucleotide
  misc_feature 1..20: note = Target: ANGPTL4; (+) strand; PAM type: NRG; PAM sequence: CAG
  source 1..20: mol_type = other DNA
aaattagctgggcatggtgg

SEQ ID NO: 10278 - DNA, 20 bp, synthetic construct
  misc_feature 1..20: note = Description of Artificial Sequence: Synthetic oligonucleotide
  misc_feature 1..20: note = Target: ANGPTL4; (+) strand; PAM type: NRG; PAM sequence: AGG
  source 1..20: mol_type = other DNA
aattagctgggcatggtggc

SEQ ID NO: 10279 - DNA, 20 bp, synthetic construct
  misc_feature 1..20: note = Description of Artificial Sequence: Synthetic oligonucleotide
  misc_feature 1..20: note = Target: ANGPTL4; (+) strand; PAM type: NRG; PAM sequence: TAG
  source 1..20: mol_type = other DNA
ggcatggtggcaggtgcctg

SEQ ID NO: 10280 - DNA, 20 bp, synthetic construct
  misc_feature 1..20: note = Description of Artificial Sequence: Synthetic oligonucleotide
  misc_feature 1..20: note = Target: ANGPTL4; (+) strand; PAM type: NRG; PAM sequence: CAG
  source 1..20: mol_type = other DNA
gtggcaggtgcctgtagtcc

SEQ ID NO: 10281 - DNA, 20 bp, synthetic construct
  misc_feature 1..20: note = Description of Artificial Sequence: Synthetic oligonucleotide
  misc_feature 1..20: note = Target: ANGPTL4; (+) strand; PAM type: NRG; PAM sequence: CGG
  source 1..20: mol_type = other DNA
tgcctgtagtcccagctact

SEQ ID NO: 10282 - DNA, 20 bp, synthetic construct
  misc_feature 1..20: note = Description of Artificial Sequence: Synthetic oligonucleotide
  misc_feature 1..20: note = Target: ANGPTL4; (+) strand; PAM type: NRG; PAM sequence: GGG
  source 1..20: mol_type = other DNA
gcctgtagtcccagctactc

SEQ ID NO: 10283 - DNA, 20 bp, synthetic construct
  misc_feature 1..20: note = Description of Artificial Sequence: Synthetic oligonucleotide
  misc_feature 1..20: note = Target: ANGPTL4; (+) strand; PAM type: NRG; PAM sequence: GAG
  source 1..20: mol_type = other DNA
ctgtagtcccagctactcgg

SEQ ID NO: 10284 - DNA, 20 bp, synthetic construct
  misc_feature 1..20: note = Description of Artificial Sequence: Synthetic oligonucleotide
  misc_feature 1..20: note = Target: ANGPTL4; (+) strand; PAM type: NRG; PAM sequence: AGG
  source 1..20: mol_type = other DNA
tgtagtcccagctactcggg

SEQ ID NO: 10285 - DNA, 20 bp, synthetic construct
  misc_feature 1..20: note = Description of Artificial Sequence: Synthetic oligonucleotide
  misc_feature 1..20: note = Target: ANGPTL4; (+) strand; PAM type: NRG; PAM sequence: GAG
  source 1..20: mol_type = other DNA
tcccagctactcgggaggct

SEQ ID NO: 10286 - DNA, 20 bp, synthetic construct
  misc_feature 1..20: note = Description of Artificial Sequence: Synthetic oligonucleotide
  misc_feature 1..20: note = Target: ANGPTL4; (+) strand; PAM type: NRG; PAM sequence: AGG
  source 1..20: mol_type = other DNA
cccagctactcgggaggctg

SEQ ID NO: 10287 - DNA, 20 bp, synthetic construct
  misc_feature 1..20: note = Description of Artificial Sequence: Synthetic oligonucleotide
  misc_feature 1..20: note = Target: ANGPTL4; (+) strand; PAM type: NRG; PAM sequence: CAG
  source 1..20: mol_type = other DNA
agctactcgggaggctgagg

SEQ ID NO: 10288 - DNA, 20 bp, synthetic construct
  misc_feature 1..20: note = Description of Artificial Sequence: Synthetic oligonucleotide
  misc_feature 1..20: note = Target: ANGPTL4; (+) strand; PAM type: NRG; PAM sequence: AGG
  source 1..20: mol_type = other DNA
gctactcgggaggctgaggc

SEQ ID NO: 10289 - DNA, 20 bp, synthetic construct
  misc_feature 1..20: note = Description of Artificial Sequence: Synthetic oligonucleotide
  misc_feature 1..20: note = Target: ANGPTL4; (+) strand; PAM type: NRG; PAM sequence: GAG
  source 1..20: mol_type = other DNA
tactcgggaggctgaggcag

SEQ ID NO: 10290 - DNA, 20 bp, synthetic construct
  misc_feature 1..20: note = Description of Artificial Sequence: Synthetic oligonucleotide
  misc_feature 1..20: note = Target: ANGPTL4; (+) strand; PAM type: NRG; PAM sequence: TGG
  source 1..20: mol_type = other DNA
gggaggctgaggcaggagaa

SEQ ID NO: 10291 - DNA, 20 bp, synthetic construct
  misc_feature 1..20: note = Description of Artificial Sequence: Synthetic oligonucleotide
  misc_feature 1..20: note = Target: ANGPTL4; (+) strand; PAM type: NRG; PAM sequence: CGG
  source 1..20: mol_type = other DNA
gcaggagaatggcactaacc

SEQ ID NO: 10292 - DNA, 20 bp, synthetic construct
  misc_feature 1..20: note = Description of Artificial Sequence: Synthetic oligonucleotide
  misc_feature 1..20: note = Target: ANGPTL4; (+) strand; PAM type: NRG; PAM sequence: GGG
  source 1..20: mol_type = other DNA
caggagaatggcactaaccc

SEQ ID NO: 10293 - DNA, 20 bp, synthetic construct
  misc_feature 1..20: note = Description of Artificial Sequence: Synthetic oligonucleotide
  misc_feature 1..20: note = Target: ANGPTL4; (+) strand; PAM type: NRG; PAM sequence: GAG
  source 1..20: mol_type = other DNA
ggagaatggcactaacccgg

SEQ ID NO: 10294 - DNA, 20 bp, synthetic construct
  misc_feature 1..20: note = Description of Artificial Sequence: Synthetic oligonucleotide
  misc_feature 1..20: note = Target: ANGPTL4; (+) strand; PAM type: NRG; PAM sequence: AGG
  source 1..20: mol_type = other DNA
gagaatggcactaacccggg

SEQ ID NO: 10295 - DNA, 20 bp, synthetic construct
  misc_feature 1..20: note = Description of Artificial Sequence: Synthetic oligonucleotide
  misc_feature 1..20: note = Target: ANGPTL4; (+) strand; PAM type: NRG; PAM sequence: TGG
  source 1..20: mol_type = other DNA
aatggcactaacccgggagg

SEQ ID NO: 10296 - DNA, 20 bp, synthetic construct
  misc_feature 1..20: note = Description of Artificial Sequence: Synthetic oligonucleotide
  misc_feature 1..20: note = Target: ANGPTL4; (+) strand; PAM type: NRG; PAM sequence: GAG
  source 1..20: mol_type = other DNA
tggcactaacccgggaggtg

SEQ ID NO: 10297 - DNA, 20 bp, synthetic construct
  misc_feature 1..20: note = Description of Artificial Sequence: Synthetic oligonucleotide
  misc_feature 1..20: note = Target: ANGPTL4; (+) strand; PAM type: NRG; PAM sequence: CAG
  source 1..20: mol_type = other DNA
aacccgggaggtggagcttg

SEQ ID NO: 10298 - DNA, 20 bp, synthetic construct
  misc_feature 1..20: note = Description of Artificial Sequence: Synthetic oligonucleotide
  misc_feature 1..20: note = Target: ANGPTL4; (+) strand; PAM type: NRG; PAM sequence: GAG
  source 1..20: mol_type = other DNA
cgggaggtggagcttgcagt

SEQ ID NO: 10299 - DNA, 20 bp, synthetic construct
  misc_feature 1..20: note = Description of Artificial Sequence: Synthetic oligonucleotide
  misc_feature 1..20: note = Target: ANGPTL4; (+) strand; PAM type: NRG; PAM sequence: GAG
  source 1..20: mol_type = other DNA
ggtggagcttgcagtgagcc

SEQ ID NO: 10300 - DNA, 20 bp, synthetic construct
  misc_feature 1..20: note = Description of Artificial Sequence: Synthetic oligonucleotide
  misc_feature 1..20: note = Target: ANGPTL4; (+) strand; PAM type: NRG; PAM sequence: CAG
  source 1..20: mol_type = other DNA
gagattgcgccactgcactc

SEQ ID NO: 10301 - DNA, 20 bp, synthetic construct
  misc_feature 1..20: note = Description of Artificial Sequence: Synthetic oligonucleotide
  misc_feature 1..20: note = Target: ANGPTL4; (+) strand; PAM type: NRG; PAM sequence: TGG
  source 1..20: mol_type = other DNA
tgcgccactgcactccagcg

SEQ ID NO: 10302 - DNA, 20 bp, synthetic construct
  misc_feature 1..20: note = Description of Artificial Sequence: Synthetic oligonucleotide
  misc_feature 1..20: note = Target: ANGPTL4; (+) strand; PAM type: NRG; PAM sequence: GGG
  source 1..20: mol_type = other DNA
gcgccactgcactccagcgt

SEQ ID NO: 10303 - DNA, 20 bp, synthetic construct
  misc_feature 1..20: note = Description of Artificial Sequence: Synthetic oligonucleotide
  misc_feature 1..20: note = Target: ANGPTL4; (+) strand; PAM type: NRG; PAM sequence: CAG
  source 1..20: mol_type = other DNA
ctgcactccagcgtgggcga

SEQ ID NO: 10304 - DNA, 20 bp, synthetic construct
  misc_feature 1..20: note = Description of Artificial Sequence: Synthetic oligonucleotide
  misc_feature 1..20: note = Target: ANGPTL4; (+) strand; PAM type: NRG; PAM sequence: GAG
  source 1..20: mol_type = other DNA
gcactccagcgtgggcgaca

SEQ ID NO: 10305 - DNA, 20 bp, synthetic construct
  misc_feature 1..20: note = Description of Artificial Sequence: Synthetic oligonucleotide
  misc_feature 1..20: note = Target: ANGPTL4; (+) strand; PAM type: NRG; PAM sequence: GAG
  source 1..20: mol_type = other DNA
tccagcgtgggcgacagagc

SEQ ID NO: 10306 - DNA, 20 bp, synthetic construct
  misc_feature 1..20: note = Description of Artificial Sequence: Synthetic oligonucleotide
  misc_feature 1..20: note = Target: ANGPTL4; (+) strand; PAM type: NRG; PAM sequence: AAG
  source 1..20: mol_type = other DNA
aaataaataaataaaaaata

SEQ ID NO: 10307 - DNA, 20 bp, synthetic construct
  misc_feature 1..20: note = Description of Artificial Sequence: Synthetic oligonucleotide
  misc_feature 1..20: note = Target: ANGPTL4; (+) strand; PAM type: NRG; PAM sequence: GAG
  source 1..20: mol_type = other DNA
ataaataaataaaaaataaa

SEQ ID NO: 10308 - DNA, 20 bp, synthetic construct
  misc_feature 1..20: note = Description of Artificial Sequence: Synthetic oligonucleotide
  misc_feature 1..20: note = Target: ANGPTL4; (+) strand; PAM type: NRG; PAM sequence: CAG
  source 1..20: mol_type = other DNA
aataaataaaaaataaagag

SEQ ID NO: 10309 - DNA, 20 bp, synthetic construct
  misc_feature 1..20: note = Description of Artificial Sequence: Synthetic oligonucleotide
  misc_feature 1..20: note = Target: ANGPTL4; (+) strand; PAM type: NRG; PAM sequence: TAG
  source 1..20: mol_type = other DNA
aaaaaataaagagcagtttt

SEQ ID NO: 10310 - DNA, 20 bp, synthetic construct
  misc_feature 1..20: note = Description of Artificial Sequence: Synthetic oligonucleotide
  misc_feature 1..20: note = Target: ANGPTL4; (+) strand; PAM type: NRG; PAM sequence: TAG
  source 1..20: mol_type = other DNA
gcagtttttagaataaaatc

SEQ ID NO: 10311 - DNA, 20 bp, synthetic construct
  misc_feature 1..20: note = Description of Artificial Sequence: Synthetic oligonucleotide
  misc_feature 1..20: note = Target: ANGPTL4; (+) strand; PAM type: NRG; PAM sequence: GAG
  source 1..20: mol_type = other DNA
agtttttagaataaaatcta

SEQ ID NO: 10312 - DNA, 20 bp, synthetic construct
  misc_feature 1..20: note = Description of Artificial Sequence: Synthetic oligonucleotide
  misc_feature 1..20: note = Target: ANGPTL4; (+) strand; PAM type: NRG; PAM sequence: GAG
  source 1..20: mol_type = other DNA
ataaaatctagagccaactt

SEQ ID NO: 10313 - DNA, 20 bp, synthetic construct
  misc_feature 1..20: note = Description of Artificial Sequence: Synthetic oligonucleotide
  misc_feature 1..20: note = Target: ANGPTL4; (+) strand; PAM type: NRG; PAM sequence: AGG
  source 1..20: mol_type = other DNA
taaaatctagagccaacttg

SEQ ID NO: 10314 - DNA, 20 bp, synthetic construct
  misc_feature 1..20: note = Description of Artificial Sequence: Synthetic oligonucleotide
  misc_feature 1..20: note = Target: ANGPTL4; (+) strand; PAM type: NRG; PAM sequence: CAG
  source 1..20: mol_type = other DNA
ctagagccaacttgaggcga

SEQ ID NO: 10315 - DNA, 20 bp, synthetic construct
  misc_feature 1..20: note = Description of Artificial Sequence: Synthetic oligonucleotide
  misc_feature 1..20: note = Target: ANGPTL4; (+) strand; PAM type: NRG; PAM sequence: TAG
  source 1..20: mol_type = other DNA
gccaacttgaggcgacagta

SEQ ID NO: 10316 - DNA, 20 bp, synthetic construct
  misc_feature 1..20: note = Description of Artificial Sequence: Synthetic oligonucleotide
  misc_feature 1..20: note = Target: ANGPTL4; (+) strand; PAM type: NRG; PAM sequence: TAG
  source 1..20: mol_type = other DNA
cgacagtatagactcttttg

SEQ ID NO: 10317 - DNA, 20 bp, synthetic construct
  misc_feature 1..20: note = Description of Artificial Sequence: Synthetic oligonucleotide
  misc_feature 1..20: note = Target: ANGPTL4; (+) strand; PAM type: NRG; PAM sequence: CAG
  source 1..20: mol_type = other DNA
actcttttgtagattgctca

SEQ ID NO: 10318 - DNA, 20 bp, synthetic construct
  misc_feature 1..20: note = Description of Artificial Sequence: Synthetic oligonucleotide
  misc_feature 1..20: note = Target: ANGPTL4; (+) strand; PAM type: NRG; PAM sequence: CAG
  source 1..20: mol_type = other DNA
cttttgtagattgctcacag

SEQ ID NO: 10319 - DNA, 20 bp, synthetic construct
  misc_feature 1..20: note = Description of Artificial Sequence: Synthetic oligonucleotide
  misc_feature 1..20: note = Target: ANGPTL4; (+) strand; PAM type: NRG; PAM sequence: AGG
  source 1..20: mol_type = other DNA
ttttgtagattgctcacagc

SEQ ID NO: 10320 - DNA, 20 bp, synthetic construct
  misc_feature 1..20: note = Description of Artificial Sequence: Synthetic oligonucleotide
  misc_feature 1..20: note = Target: ANGPTL4; (+) strand; PAM type: NRG; PAM sequence: AAG
  source 1..20: mol_type = other DNA
tgctcacagcaggtgccctt

SEQ ID NO: 10321 - DNA, 20 bp, synthetic construct
  misc_feature 1..20: note = Description of Artificial Sequence: Synthetic oligonucleotide
  misc_feature 1..20: note = Target: ANGPTL4; (+) strand; PAM type: NRG; PAM sequence: TGG
  source 1..20: mol_type = other DNA
agcaggtgcccttaagaccc

SEQ ID NO: 10322 - DNA, 20 bp, synthetic construct
  misc_feature 1..20: note = Description of Artificial Sequence: Synthetic oligonucleotide
  misc_feature 1..20: note = Target: ANGPTL4; (+) strand; PAM type: NRG; PAM sequence: GGG
  source 1..20: mol_type = other DNA
gcaggtgcccttaagaccct

SEQ ID NO: 10323 - DNA, 20 bp, synthetic construct
  misc_feature 1..20: note = Description of Artificial Sequence: Synthetic oligonucleotide
  misc_feature 1..20: note = Target: ANGPTL4; (+) strand; PAM type: NRG; PAM sequence: TGG
  source 1..20: mol_type = other DNA
ctgtgatgtgttttgtgctg

SEQ ID NO: 10324 - DNA, 20 bp, synthetic construct
  misc_feature 1..20: note = Description of Artificial Sequence: Synthetic oligonucleotide
  misc_feature 1..20: note = Target: ANGPTL4; (+) strand; PAM type: NRG; PAM sequence: GGG
  source 1..20: mol_type = other DNA
tgtgatgtgttttgtgctgt

SEQ ID NO: 10325 - DNA, 20 bp, synthetic construct
  misc_feature 1..20: note = Description of Artificial Sequence: Synthetic oligonucleotide
  misc_feature 1..20: note = Target: ANGPTL4; (+) strand; PAM type: NRG; PAM sequence: TGG
  source 1..20: mol_type = other DNA
gttttgtgctgtgggacaca

SEQ ID NO: 10326 - DNA, 20 bp, synthetic construct
  misc_feature 1..20: note = Description of Artificial Sequence: Synthetic oligonucleotide
  misc_feature 1..20: note = Target: ANGPTL4; (+) strand; PAM type: NRG; PAM sequence: AAG
  source 1..20: mol_type = other DNA
ctgtgggacacatggctcca

SEQ ID NO: 10327 - DNA, 20 bp, synthetic construct
  misc_feature 1..20: note = Description of Artificial Sequence: Synthetic oligonucleotide
  misc_feature 1..20: note = Target: ANGPTL4; (+) strand; PAM type: NRG; PAM sequence: AAG
  source 1..20: mol_type = other DNA
tgggacacatggctccaaag

SEQ ID NO: 10328 - DNA, 20 bp, synthetic construct
  misc_feature 1..20: note = Description of Artificial Sequence: Synthetic oligonucleotide
  misc_feature 1..20: note = Target: ANGPTL4; (+) strand; PAM type: NRG; PAM sequence: CAG
  source 1..20: mol_type = other DNA
ccaaagaagtccctgaaaat

SEQ ID NO: 10329 - DNA, 20 bp, synthetic construct
  misc_feature 1..20: note = Description of Artificial Sequence: Synthetic oligonucleotide
  misc_feature 1..20: note = Target: ANGPTL4; (+) strand; PAM type: NRG; PAM sequence: AAG
  source 1..20: mol_type = other DNA
cctgaaaatcagatcatgaa

SEQ ID NO: 10330 - DNA, 20 bp, synthetic construct
  misc_feature 1..20: note = Description of Artificial Sequence: Synthetic oligonucleotide
  misc_feature 1..20: note = Target: ANGPTL4; (+) strand; PAM type: NRG; PAM sequence: AGG
  source 1..20: mol_type = other DNA
ctgaaaatcagatcatgaaa

SEQ ID NO: 10331 - DNA, 20 bp, synthetic construct
  misc_feature 1..20: note = Description of Artificial Sequence: Synthetic oligonucleotide
  misc_feature 1..20: note = Target: ANGPTL4; (+) strand; PAM type: NRG; PAM sequence: CAG
  source 1..20: mol_type = other DNA
tcagatcatgaaaaggtcat

SEQ ID NO: 10332 - DNA, 20 bp, synthetic construct
  misc_feature 1..20: note = Description of Artificial Sequence: Synthetic oligonucleotide
  misc_feature 1..20: note = Target: ANGPTL4; (+) strand; PAM type: NRG; PAM sequence: AGG
  source 1..20: mol_type = other DNA
cagatcatgaaaaggtcatc

SEQ ID NO: 10333 - DNA, 20 bp, synthetic construct
  misc_feature 1..20: note = Description of Artificial Sequence: Synthetic oligonucleotide
  misc_feature 1..20: note = Target: ANGPTL4; (+) strand; PAM type: NRG; PAM sequence: TGG
  source 1..20: mol_type = other DNA
tcatgaaaaggtcatcaggt

SEQ ID NO: 10334 - DNA, 20 bp, synthetic construct
  misc_feature 1..20: note = Description of Artificial Sequence: Synthetic oligonucleotide
  misc_feature 1..20: note = Target: ANGPTL4; (+) strand; PAM type: NRG; PAM sequence: GGG
  source 1..20: mol_type = other DNA
catgaaaaggtcatcaggtt

SEQ ID NO: 10335 - DNA, 20 bp, synthetic construct
  misc_feature 1..20: note = Description of Artificial Sequence: Synthetic oligonucleotide
  misc_feature 1..20: note = Target: ANGPTL4; (+) strand; PAM type: NRG; PAM sequence: GGG
  source 1..20: mol_type = other DNA
atgaaaaggtcatcaggttg

SEQ ID NO: 10336 - DNA, 20 bp, synthetic construct
  misc_feature 1..20: note = Description of Artificial Sequence: Synthetic oligonucleotide
  misc_feature 1..20: note = Target: ANGPTL4; (+) strand; PAM type: NRG; PAM sequence: AAG
  source 1..20: mol_type = other DNA
aaaaggtcatcaggttgggg

SEQ ID NO: 10337 - DNA, 20 bp, synthetic construct
  misc_feature 1..20: note = Description of Artificial Sequence: Synthetic oligonucleotide
  misc_feature 1..20: note = Target: ANGPTL4; (+) strand; PAM type: NRG; PAM sequence: CAG
  source 1..20: mol_type = other DNA
aggttggggaagtaattgat

SEQ ID NO: 10338 - DNA, 20 bp, synthetic construct
  misc_feature 1..20: note = Description of Artificial Sequence: Synthetic oligonucleotide
  misc_feature 1..20: note = Target: ANGPTL4; (+) strand; PAM type: NRG; PAM sequence: CAG
  source 1..20: mol_type = other DNA
aagtaattgatcagttctct

SEQ ID NO: 10339 - DNA, 20 bp, synthetic construct
  misc_feature 1..20: note = Description of Artificial Sequence: Synthetic oligonucleotide
  misc_feature 1..20: note = Target: ANGPTL4; (+) strand; PAM type: NRG; PAM sequence: AAG
  source 1..20: mol_type = other DNA
ttgatcagttctctcagttt

SEQ ID NO: 10340 - DNA, 20 bp, synthetic construct
  misc_feature 1..20: note = Description of Artificial Sequence: Synthetic oligonucleotide
  misc_feature 1..20: note = Target: ANGPTL4; (+) strand; PAM type: NRG; PAM sequence: AAG
  source 1..20: mol_type = other DNA
atcagttctctcagtttaag

SEQ ID NO: 10341 - DNA, 20 bp, synthetic construct
  misc_feature 1..20: note = Description of Artificial Sequence: Synthetic oligonucleotide
  misc_feature 1..20: note = Target: ANGPTL4; (+) strand; PAM type: NRG; PAM sequence: AGG
  source 1..20: mol_type = other DNA
tcagttctctcagtttaaga

SEQ ID NO: 10342 - DNA, 20 bp, synthetic construct
  misc_feature 1..20: note = Description of Artificial Sequence: Synthetic oligonucleotide
  misc_feature 1..20: note = Target: ANGPTL4; (+) strand; PAM type: NRG; PAM sequence: TGG
  source 1..20: mol_type = other DNA
gttctctcagtttaagaagg

SEQ ID NO: 10343 - DNA, 20 bp, synthetic construct
  misc_feature 1..20: note = Description of Artificial Sequence: Synthetic oligonucleotide
  misc_feature 1..20: note = Target: ANGPTL4; (+) strand; PAM type: NRG; PAM sequence: GGG
  source 1..20: mol_type = other DNA
ttctctcagtttaagaaggt

SEQ ID NO: 10344 - DNA, 20 bp, synthetic construct
  misc_feature 1..20: note = Description of Artificial Sequence: Synthetic oligonucleotide
  misc_feature 1..20: note = Target: ANGPTL4; (+) strand; PAM type: NRG; PAM sequence: GGG
  source 1..20: mol_type = other DNA
tctctcagtttaagaaggtg

SEQ ID NO: 10345 - DNA, 20 bp, synthetic construct
  misc_feature 1..20: note = Description of Artificial Sequence: Synthetic oligonucleotide
  misc_feature 1..20: note = Target: ANGPTL4; (+) strand; PAM type: NRG; PAM sequence: AAG
  source 1..20: mol_type = other DNA
ctcagtttaagaaggtgggg

SEQ ID NO: 10346 - DNA, 20 bp, synthetic construct
  misc_feature 1..20: note = Description of Artificial Sequence: Synthetic oligonucleotide
  misc_feature 1..20: note = Target: ANGPTL4; (+) strand; PAM type: NRG; PAM sequence: GAG
  source 1..20: mol_type = other DNA
cagtttaagaaggtggggaa

SEQ ID NO: 10347 - DNA, 20 bp, synthetic construct
  misc_feature 1..20: note = Description of Artificial Sequence: Synthetic oligonucleotide
  misc_feature 1..20: note = Target: ANGPTL4; (+) strand; PAM type: NRG; PAM sequence: AGG
  source 1..20: mol_type = other DNA
agtttaagaaggtggggaag

SEQ ID NO: 10348 - DNA, 20 bp, synthetic construct
  misc_feature 1..20: note = Description of Artificial Sequence: Synthetic oligonucleotide
  misc_feature 1..20: note = Target: ANGPTL4; (+) strand; PAM type: NRG; PAM sequence: GAG
  source 1..20: mol_type = other DNA
tttaagaaggtggggaagag

SEQ ID NO: 10349 - DNA, 20 bp, synthetic construct
  misc_feature 1..20: note = Description of Artificial Sequence: Synthetic oligonucleotide
  misc_feature 1..20: note = Target: ANGPTL4; (+) strand; PAM type: NRG; PAM sequence: AGG
  source 1..20: mol_type = other DNA
ttaagaaggtggggaagagg

SEQ ID NO: 10350 - DNA, 20 bp, synthetic construct
  misc_feature 1..20: note = Description of Artificial Sequence: Synthetic oligonucleotide
  misc_feature 1..20: note = Target: ANGPTL4; (+) strand; PAM type: NRG; PAM sequence: GAG
  source 1..20: mol_type = other DNA
aagaaggtggggaagaggag

SEQ ID NO: 10351 - DNA, 20 bp, synthetic construct
  misc_feature 1..20: note = Description of Artificial Sequence: Synthetic oligonucleotide
  misc_feature 1..20: note = Target: ANGPTL4; (+) strand; PAM type: NRG; PAM sequence: TGG
  source 1..20: mol_type = other DNA
aagaggaggagcttgcattc

SEQ ID NO: 10352 - DNA, 20 bp, synthetic construct
  misc_feature 1..20: note = Description of Artificial Sequence: Synthetic oligonucleotide
  misc_feature 1..20: note = Target: ANGPTL4; (+) strand; PAM type: NRG; PAM sequence: GGG
  source 1..20: mol_type = other DNA
agaggaggagcttgcattct

SEQ ID NO: 10353 - DNA, 20 bp, synthetic construct
  misc_feature 1..20: note = Description of Artificial Sequence: Synthetic oligonucleotide
  misc_feature 1..20: note = Target: ANGPTL4; (+) strand; PAM type: NRG; PAM sequence: TAG
  source 1..20: mol_type = other DNA
gaggagcttgcattctggga

SEQ ID NO: 10354 - DNA, 20 bp, synthetic construct
  misc_feature 1..20: note = Description of Artificial Sequence: Synthetic oligonucleotide
  misc_feature 1..20: note = Target: ANGPTL4; (+) strand; PAM type: NRG; PAM sequence: TGG
  source 1..20: mol_type = other DNA
gcttgcattctgggatagcc

SEQ ID NO: 10355 - DNA, 20 bp, synthetic construct
  misc_feature 1..20: note = Description of Artificial Sequence: Synthetic oligonucleotide
  misc_feature 1..20: note = Target: ANGPTL4; (+) strand; PAM type: NRG; PAM sequence: GGG
  source 1..20: mol_type = other DNA
cttgcattctgggatagcct

SEQ ID NO: 10356 - DNA, 20 bp, synthetic construct
  misc_feature 1..20: note = Description of Artificial Sequence: Synthetic oligonucleotide
  misc_feature 1..20: note = Target: ANGPTL4; (+) strand; PAM type: NRG; PAM sequence: TAG
  source 1..20: mol_type = other DNA
cattctgggatagcctggga

SEQ ID NO: 10357 - DNA, 20 bp, synthetic construct
  misc_feature 1..20: note = Description of Artificial Sequence: Synthetic oligonucleotide
  misc_feature 1..20: note = Target: ANGPTL4; (+) strand; PAM type: NRG; PAM sequence: CAG
  source 1..20: mol_type = other DNA
gggatagctgtgtccctact

SEQ ID NO: 10358 - DNA, 20 bp, synthetic construct
  misc_feature 1..20: note = Description of Artificial Sequence: Synthetic oligonucleotide
  misc_feature 1..20: note = Target: ANGPTL4; (+) strand; PAM type: NRG; PAM sequence: GAG
  source 1..20: mol_type = other DNA
gatagctgtgtccctactca

SEQ ID NO: 10359 - DNA, 20 bp, synthetic construct
  misc_feature 1..20: note = Description of Artificial Sequence: Synthetic oligonucleotide
  misc_feature 1..20: note = Target: ANGPTL4; (+) strand; PAM type: NRG; PAM sequence: GAG
  source 1..20: mol_type = other DNA
tagctgtgtccctactcaga

SEQ ID NO: 10360 - DNA, 20 bp, synthetic construct
  misc_feature 1..20: note = Description of Artificial Sequence: Synthetic oligonucleotide
  misc_feature 1..20: note = Target: ANGPTL4; (+) strand; PAM type: NRG; PAM sequence: GAG
  source 1..20: mol_type = other DNA
gctgtgtccctactcagaga

SEQ ID NO: 10361 - DNA, 20 bp, synthetic construct
  misc_feature 1..20: note = Description of Artificial Sequence: Synthetic oligonucleotide
  misc_feature 1..20: note = Target: ANGPTL4; (+) strand; PAM type: NRG; PAM sequence: AGG
  source 1..20: mol_type = other DNA
ctgtgtccctactcagagag

SEQ ID NO: 10362 - DNA, 20 bp, synthetic construct
  misc_feature 1..20: note = Description of Artificial Sequence: Synthetic oligonucleotide
  misc_feature 1..20: note = Target: ANGPTL4; (+) strand; PAM type: NRG; PAM sequence: TGG
  source 1..20: mol_type = other DNA
gtccctactcagagagaggc

SEQ ID NO: 10363 - DNA, 20 bp, synthetic construct
  misc_feature 1..20: note = Description of Artificial Sequence: Synthetic oligonucleotide
  misc_feature 1..20: note = Target: ANGPTL4; (+) strand; PAM type: NRG; PAM sequence: GGG
  source 1..20: mol_type = other DNA
tccctactcagagagaggct

SEQ ID NO: 10364 - DNA, 20 bp, synthetic construct
  misc_feature 1..20: note = Description of Artificial Sequence: Synthetic oligonucleotide
  misc_feature 1..20: note = Target: ANGPTL4; (+) strand; PAM type: NRG; PAM sequence: GGG
  source 1..20: mol_type = other DNA
ccctactcagagagaggctg

SEQ ID NO: 10365 - DNA, 20 bp, synthetic construct
  misc_feature 1..20: note = Description of Artificial Sequence: Synthetic oligonucleotide
  misc_feature 1..20: note = Target: ANGPTL4; (+) strand; PAM type: NRG; PAM sequence: GGG
  source 1..20: mol_type = other DNA
cctactcagagagaggctgg

SEQ ID NO: 10366 - DNA, 20 bp, synthetic construct
  misc_feature 1..20: note = Description of Artificial Sequence: Synthetic oligonucleotide
  misc_feature 1..20: note = Target: ANGPTL4; (+) strand; PAM type: NRG; PAM sequence: TGG
  source 1..20: mol_type = other DNA
tcagagagaggctgggggct

SEQ ID NO: 10367 - DNA, 20 bp, synthetic construct
  misc_feature 1..20: note = Description of Artificial Sequence: Synthetic oligonucleotide
  misc_feature 1..20: note = Target: ANGPTL4; (+) strand; PAM type: NRG; PAM sequence: GGG
  source 1..20: mol_type = other DNA
cagagagaggctgggggctt

SEQ ID NO: 10368 - DNA, 20 bp, synthetic construct
  misc_feature 1..20: note = Description of Artificial Sequence: Synthetic oligonucleotide
  misc_feature 1..20: note = Target: ANGPTL4; (+) strand; PAM type: NRG; PAM sequence: GGG
  source 1..20: mol_type = other DNA
agagagaggctgggggcttg

SEQ ID NO: 10369 - DNA, 20 bp, synthetic construct
  misc_feature 1..20: note = Description of Artificial Sequence: Synthetic oligonucleotide
  misc_feature 1..20: note = Target: ANGPTL4; (+) strand; PAM type: NRG; PAM sequence: GGG
  source 1..20: mol_type = other DNA
gagagaggctgggggcttgg

SEQ ID NO: 10370 - DNA, 20 bp, synthetic construct
  misc_feature 1..20: note = Description of Artificial Sequence: Synthetic oligonucleotide
  misc_feature 1..20: note = Target: ANGPTL4; (+) strand; PAM type: NRG; PAM sequence: TGG
  source 1..20: mol_type = other DNA
agaggctgggggcttggggg

SEQ ID NO: 10371 - DNA, 20 bp, synthetic construct
  misc_feature 1..20: note = Description of Artificial Sequence: Synthetic oligonucleotide
  misc_feature 1..20: note = Target: ANGPTL4; (+) strand; PAM type: NRG; PAM sequence: CAG
  source 1..20: mol_type = other DNA
gctgggggcttgggggtgga

SEQ ID NO: 10372 - DNA, 20 bp, synthetic construct
  misc_feature 1..20: note = Description of Artificial Sequence: Synthetic oligonucleotide
  misc_feature 1..20: note = Target: ANGPTL4; (+) strand; PAM type: NRG; PAM sequence: AGG
  source 1..20: mol_type = other DNA
ctgggggcttgggggtggac

SEQ ID NO: 10373 - DNA, 20 bp, synthetic construct
  misc_feature 1..20: note = Description of Artificial Sequence: Synthetic oligonucleotide
  misc_feature 1..20: note = Target: ANGPTL4; (+) strand; PAM type: NRG; PAM sequence: CAG
  source 1..20: mol_type = other DNA
gggcttgggggtggacaggc

SEQ ID NO: 10374 - DNA, 20 bp, synthetic construct
  misc_feature 1..20: note = Description of Artificial Sequence: Synthetic oligonucleotide
  misc_feature 1..20: note = Target: ANGPTL4; (+) strand; PAM type: NRG; PAM sequence: CGG
  source 1..20: mol_type = other DNA
ttgggggtggacaggccaga

SEQ ID NO: 10375 - DNA, 20 bp, synthetic construct
  misc_feature 1..20: note = Description of Artificial Sequence: Synthetic oligonucleotide
  misc_feature 1..20: note = Target: ANGPTL4; (+) strand; PAM type: NRG; PAM sequence: TGG
  source 1..20: mol_type = other DNA
catctgaacctactcctcac

SEQ ID NO: 10376 - DNA, 20 bp, synthetic construct
  misc_feature 1..20: note = Description of Artificial Sequence: Synthetic oligonucleotide
  misc_feature 1..20: note = Target: ANGPTL4; (+) strand; PAM type: NRG; PAM sequence: GGG
  source 1..20: mol_type = other DNA
atctgaacctactcctcact

SEQ ID NO: 10377 - DNA, 20 bp, synthetic construct
  misc_feature 1..20: note = Description of Artificial Sequence: Synthetic oligonucleotide
  misc_feature 1..20: note = Target: ANGPTL4; (+) strand; PAM type: NRG; PAM sequence: GGG
  source 1..20: mol_type = other DNA
tctgaacctactcctcactg

SEQ ID NO: 10378 - DNA, 20 bp, synthetic construct
  misc_feature 1..20: note = Description of Artificial Sequence: Synthetic oligonucleotide
  misc_feature 1..20: note = Target: ANGPTL4; (+) strand; PAM type: NRG; PAM sequence: TGG
  source 1..20: mol_type = other DNA
cctttcctgtccactgctgc

SEQ ID NO: 10379 - DNA, 20 bp, synthetic construct
  misc_feature 1..20: note = Description of Artificial Sequence: Synthetic oligonucleotide
  misc_feature 1..20: note = Target: ANGPTL4; (+) strand; PAM type: NRG; PAM sequence: GGG
  source 1..20: mol_type = other DNA
ctttcctgtccactgctgct

SEQ ID NO: 10380 - DNA, 20 bp, synthetic construct
  misc_feature 1..20: note = Description of Artificial Sequence: Synthetic oligonucleotide
  misc_feature 1..20: note = Target: ANGPTL4; (+) strand; PAM type: NRG; PAM sequence: GAG
  source 1..20: mol_type = other DNA
ttcctgtccactgctgctgg

SEQ ID NO: 10381 - DNA, 20 bp, synthetic construct
  misc_feature 1..20: note = Description of Artificial Sequence: Synthetic oligonucleotide
  misc_feature 1..20: note = Target: ANGPTL4; (+) strand; PAM type: NRG; PAM sequence: AGG
  source 1..20: mol_type = other DNA
tcctgtccactgctgctggg

SEQ ID NO: 10382 - DNA, 20 bp, synthetic construct
  misc_feature 1..20: note = Description of Artificial Sequence: Synthetic oligonucleotide
  misc_feature 1..20: note = Target: ANGPTL4; (+) strand; PAM type: NRG; PAM sequence: GGG
  source 1..20: mol_type = other DNA
cctgtccactgctgctggga

SEQ ID NO: 10383 - DNA, 20 bp, synthetic construct
  misc_feature 1..20: note = Description of Artificial Sequence: Synthetic oligonucleotide
  misc_feature 1..20: note = Target: ANGPTL4; (+) strand; PAM type: NRG; PAM sequence: TGG
  source 1..20: mol_type = other DNA
ctgggagggatttgctgtcc

SEQ ID NO: 10384 - DNA, 20 bp, synthetic construct
  misc_feature 1..20: note = Description of Artificial Sequence: Synthetic oligonucleotide
  misc_feature 1..20: note = Target: ANGPTL4; (+) strand; PAM type: NRG; PAM sequence: TGG
  source 1..20: mol_type = other DNA
ggatttgctgtcctggcatc

SEQ ID NO: 10385 - DNA, 20 bp, synthetic construct
  misc_feature 1..20: note = Description of Artificial Sequence: Synthetic oligonucleotide
  misc_feature 1..20: note = Target: ANGPTL4; (+) strand; PAM type: NRG; PAM sequence: CAG
  source 1..20: mol_type = other DNA
tgctgtcctggcatctggcc

SEQ ID NO: 10386 - DNA, 20 bp, synthetic construct
  misc_feature 1..20: note = Description of Artificial Sequence: Synthetic oligonucleotide
  misc_feature 1..20: note = Target: ANGPTL4; (+) strand; PAM type: NRG; PAM sequence: CGG
  source 1..20: mol_type = other DNA
ctggcatctggcccagctga

SEQ ID NO: 10387 - DNA, 20 bp, synthetic construct
  misc_feature 1..20: note = Description of Artificial Sequence: Synthetic oligonucleotide
  misc_feature 1..20: note = Target: ANGPTL4; (+) strand; PAM type: NRG; PAM sequence: GGG
  source 1..20: mol_type = other DNA
tggcatctggcccagctgac

SEQ ID NO: 10388 - DNA, 20 bp, synthetic construct
  misc_feature 1..20: note = Description of Artificial Sequence: Synthetic oligonucleotide
  misc_feature 1..20: note = Target: ANGPTL4; (+) strand; PAM type: NRG; PAM sequence: GGG
  source 1..20: mol_type = other DNA
ggcatctggcccagctgacg

SEQ ID NO: 10389 - DNA, 20 bp, synthetic construct
  misc_feature 1..20: note = Description of Artificial Sequence: Synthetic oligonucleotide
  misc_feature 1..20: note = Target: ANGPTL4; (+) strand; PAM type: NRG; PAM sequence: AAG
  source 1..20: mol_type = other DNA
ctggcccagctgacggggcc

SEQ ID NO: 10390 - DNA, 20 bp, synthetic construct
  misc_feature 1..20: note = Description of Artificial Sequence: Synthetic oligonucleotide
  misc_feature 1..20: note = Target: ANGPTL4; (+) strand; PAM type: NRG; PAM sequence: GAG
  source 1..20: mol_type = other DNA
gctgacggggccaagtgtat

SEQ ID NO: 10391 - DNA, 20 bp, synthetic construct
  misc_feature 1..20: note = Description of Artificial Sequence: Synthetic oligonucleotide
  misc_feature 1..20: note = Target: ANGPTL4; (+) strand; PAM type: NRG; PAM sequence: TGG
  source 1..20: mol_type = other DNA
gacggggccaagtgtatgag

SEQ ID NO: 10392 - DNA, 20 bp, synthetic construct
  misc_feature 1..20: note = Description of Artificial Sequence: Synthetic oligonucleotide
  misc_feature 1..20: note = Target: ANGPTL4; (+) strand; PAM type: NRG; PAM sequence: CAG
  source 1..20: mol_type = other DNA
ggggccaagtgtatgagtgg

SEQ ID NO: 10393 - DNA, 20 bp, synthetic construct
  misc_feature 1..20: note = Description of Artificial Sequence: Synthetic oligonucleotide
  misc_feature 1..20: note = Target: ANGPTL4; (+) strand; PAM type: NRG; PAM sequence: CAG
  source 1..20: mol_type = other DNA
atgagtggcagcctgcacgt

SEQ ID NO: 10394 - DNA, 20 bp, synthetic construct
  misc_feature 1..20: note = Description of Artificial Sequence: Synthetic oligonucleotide
  misc_feature 1..20: note = Target: ANGPTL4; (+) strand; PAM type: NRG; PAM sequence: TGG
  source 1..20: mol_type = other DNA
gcagcctgcacgtcagccct

SEQ ID NO: 10395 - DNA, 20 bp, synthetic construct
  misc_feature 1..20: note = Description of Artificial Sequence: Synthetic oligonucleotide
  misc_feature 1..20: note = Target: ANGPTL4; (+) strand; PAM type: NRG; PAM sequence: GGG
  source 1..20: mol_type = other DNA
cagcctgcacgtcagccctt

SEQ ID NO: 10396 - DNA, 20 bp, synthetic construct
  misc_feature 1..20: note = Description of Artificial Sequence: Synthetic oligonucleotide
  misc_feature 1..20: note = Target: ANGPTL4; (+) strand; PAM type: NRG; PAM sequence: CAG
  source 1..20: mol_type = other DNA
cacgtcagcccttgggtgtg

SEQ ID NO: 10397 - DNA, 20 bp, synthetic construct
  misc_feature 1..20: note = Description of Artificial Sequence: Synthetic oligonucleotide
  misc_feature 1..20: note = Target: ANGPTL4; (+) strand; PAM type: NRG; PAM sequence: CAG
  source 1..20: mol_type = other DNA
agcccttgggtgtgcagttt

SEQ ID NO: 10398 - DNA, 20 bp, synthetic construct
  misc_feature 1..20: note = Description of Artificial Sequence: Synthetic oligonucleotide
  misc_feature 1..20: note = Target: ANGPTL4; (+) strand; PAM type: NRG; PAM sequence: CAG
  source 1..20: mol_type = other DNA
gggtgtgcagtttcagattc

SEQ ID NO: 10399 - DNA, 20 bp, synthetic construct
  misc_feature 1..20: note = Description of Artificial Sequence: Synthetic oligonucleotide
  misc_feature 1..20: note = Target: ANGPTL4; (+) strand; PAM type: NRG; PAM sequence: GAG
  source 1..20: mol_type = other DNA
gtgtgcagtttcagattcca

SEQ ID NO: 10400 - DNA, 20 bp, synthetic construct
  misc_feature 1..20: note = Description of Artificial Sequence: Synthetic oligonucleotide
  misc_feature 1..20: note = Target: ANGPTL4; (+) strand; PAM type: NRG; PAM sequence: GAG
  source 1..20: mol_type = other DNA
agtttcagattccagagaat

SEQ ID NO: 10401 - DNA, 20 bp, synthetic construct
  misc_feature 1..20: note = Description of Artificial Sequence: Synthetic oligonucleotide
  misc_feature 1..20: note = Target: ANGPTL4; (+) strand; PAM type: NRG; PAM sequence: TGG
  source 1..20: mol_type = other DNA
tcagattccagagaatgagc

SEQ ID NO: 10402 - DNA, 20 bp, synthetic construct
  misc_feature 1..20: note = Description of Artificial Sequence: Synthetic oligonucleotide
  misc_feature 1..20: note = Target: ANGPTL4; (+) strand; PAM type: NRG; PAM sequence: TGG
  source 1..20: mol_type = other DNA
ttccagagaatgagctggct

SEQ ID NO: 10403 - DNA, 20 bp, synthetic construct
  misc_feature 1..20: note = Description of Artificial Sequence: Synthetic oligonucleotide
  misc_feature 1..20: note = Target: ANGPTL4; (+) strand; PAM type: NRG; PAM sequence: GAG
  source 1..20: mol_type = other DNA
ccagagaatgagctggcttg

SEQ ID NO: 10404 - DNA, 20 bp, synthetic construct
  misc_feature 1..20: note = Description of Artificial Sequence: Synthetic oligonucleotide
  misc_feature 1..20: note = Target: ANGPTL4; (+) strand; PAM type: NRG; PAM sequence: GAG
  source 1..20: mol_type = other DNA
agctggcttggagccctgct

SEQ ID NO: 10405 - DNA, 20 bp, synthetic construct
  misc_feature 1..20: note = Description of Artificial Sequence: Synthetic oligonucleotide
  misc_feature 1..20: note = Target: ANGPTL4; (+) strand; PAM type: NRG; PAM sequence: CAG
  source 1..20: mol_type = other DNA
gtcaatgcccttctccttgc

SEQ ID NO: 10406 - DNA, 20 bp, synthetic construct
  misc_feature 1..20: note = Description of Artificial Sequence: Synthetic oligonucleotide
  misc_feature 1..20: note = Target: ANGPTL4; (+) strand; PAM type: NRG; PAM sequence: GAG
  source 1..20: mol_type = other DNA
cttctccttgccagtgctct

SEQ ID NO: 10407 - DNA, 20 bp, synthetic construct
  misc_feature 1..20: note = Description of Artificial Sequence: Synthetic oligonucleotide
  misc_feature 1..20: note = Target: ANGPTL4; (+) strand; PAM type: NRG; PAM sequence: GAG
  source 1..20: mol_type = other DNA
gctctgagccaacctgcccc

SEQ ID NO: 10408 - DNA, 20 bp, synthetic construct
  misc_feature 1..20: note = Description of Artificial Sequence: Synthetic oligonucleotide
  misc_feature 1..20: note = Target: ANGPTL4; (+) strand; PAM type: NRG; PAM sequence: TGG
  source 1..20: mol_type = other DNA
aacctgccccgagttcttcc

SEQ ID NO: 10409 - DNA, 20 bp, synthetic construct
  misc_feature 1..20: note = Description of Artificial Sequence: Synthetic oligonucleotide
  misc_feature 1..20: note = Target: ANGPTL4; (+) strand; PAM type: NRG; PAM sequence: CAG
  source 1..20: mol_type = other DNA
ctgccccgagttcttcctgg

SEQ ID NO: 10410 - DNA, 20 bp, synthetic construct
  misc_feature 1..20: note = Description of Artificial Sequence: Synthetic oligonucleotide
  misc_feature 1..20: note = Target: ANGPTL4; (+) strand; PAM type: NRG; PAM sequence: AGG
  source 1..20: mol_type = other DNA
tgccccgagttcttcctggc

SEQ ID NO: 10411 - DNA, 20 bp, synthetic construct
  misc_feature 1..20: note = Description of Artificial Sequence: Synthetic oligonucleotide
  misc_feature 1..20: note = Target: ANGPTL4; (+) strand; PAM type: NRG; PAM sequence: TGG
  source 1..20: mol_type = other DNA
ccgagttcttcctggcaggc

SEQ ID NO: 10412 - DNA, 20 bp, synthetic construct
  misc_feature 1..20: note = Description of Artificial Sequence: Synthetic oligonucleotide
  misc_feature 1..20: note = Target: ANGPTL4; (+) strand; PAM type: NRG; PAM sequence: CAG
  source 1..20: mol_type = other DNA
ggcaggctggttttctgtgc

SEQ ID NO: 10413 - DNA, 20 bp, synthetic construct
  misc_feature 1..20: note = Description of Artificial Sequence: Synthetic oligonucleotide
  misc_feature 1..20: note = Target: ANGPTL4; (+) strand; PAM type: NRG; PAM sequence: CAG
  source 1..20: mol_type = other DNA
tgccagcctccccttcctga

SEQ ID NO: 10414 - DNA, 20 bp, synthetic construct
  misc_feature 1..20: note = Description of Artificial Sequence: Synthetic oligonucleotide
  misc_feature 1..20: note = Target: ANGPTL4; (+) strand; PAM type: NRG; PAM sequence: AGG
  source 1..20: mol_type = other DNA
gccagcctccccttcctgac

SEQ ID NO: 10415 - DNA, 20 bp, synthetic construct
  misc_feature 1..20: note = Description of Artificial Sequence: Synthetic oligonucleotide
  misc_feature 1..20: note = Target: ANGPTL4; (+) strand; PAM type: NRG; PAM sequence: GGG
  source 1..20: mol_type = other DNA
ccagcctccccttcctgaca

SEQ ID NO: 10416 - DNA, 20 bp, synthetic construct
  misc_feature 1..20: note = Description of Artificial Sequence: Synthetic oligonucleotide
  misc_feature 1..20: note = Target: ANGPTL4; (+) strand; PAM type: NRG; PAM sequence: TAG
  source 1..20: mol_type = other DNA
ctccccttcctgacagggta

SEQ ID NO: 10417 - DNA, 20 bp, synthetic construct
  misc_feature 1..20: note = Description of Artificial Sequence: Synthetic oligonucleotide
  misc_feature 1..20: note = Target: ANGPTL4; (+) strand; PAM type: NRG; PAM sequence: AGG
  source 1..20: mol_type = other DNA
tccccttcctgacagggtat

SEQ ID NO: 10418 - DNA, 20 bp, synthetic construct
  misc_feature 1..20: note = Description of Artificial Sequence: Synthetic oligonucleotide
  misc_feature 1..20: note = Target: ANGPTL4; (+) strand; PAM type: NRG; PAM sequence: GGG
  source 1..20: mol_type = other DNA
ccccttcctgacagggtata

SEQ ID NO: 10419 - DNA, 20 bp, synthetic construct
  misc_feature 1..20: note = Description of Artificial Sequence: Synthetic oligonucleotide
  misc_feature 1..20: note = Target: ANGPTL4; (+) strand; PAM type: NRG; PAM sequence: GGG
  source 1..20: mol_type = other DNA
cccttcctgacagggtatag

SEQ ID NO: 10420 - DNA, 20 bp, synthetic construct
  misc_feature 1..20: note = Description of Artificial Sequence: Synthetic oligonucleotide
  misc_feature 1..20: note = Target: ANGPTL4; (+) strand; PAM type: NRG; PAM sequence: TGG
  source 1..20: mol_type = other DNA
cctgacagggtataggggaa

SEQ ID NO: 10421 - DNA, 20 bp, synthetic construct
  misc_feature 1..20: note = Description of Artificial Sequence: Synthetic oligonucleotide
  misc_feature 1..20: note = Target: ANGPTL4; (+) strand; PAM type: NRG; PAM sequence: GGG
  source 1..20: mol_type = other DNA
ctgacagggtataggggaat

SEQ ID NO: 10422 - DNA, 20 bp, synthetic construct
  misc_feature 1..20: note = Description of Artificial Sequence: Synthetic oligonucleotide
  misc_feature 1..20: note = Target: ANGPTL4; (+) strand; PAM type: NRG; PAM sequence: TAG
  source 1..20: mol_type = other DNA
acagggtataggggaatggg

SEQ ID NO: 10423 - DNA, 20 bp, synthetic construct
  misc_feature 1..20: note = Description of Artificial Sequence: Synthetic oligonucleotide
  misc_feature 1..20: note = Target: ANGPTL4; (+) strand; PAM type: NRG; PAM sequence: AGG
  source 1..20: mol_type = other DNA
cagggtataggggaatgggt

SEQ ID NO: 10424 - DNA, 20 bp, synthetic construct
  misc_feature 1..20: note = Description of Artificial Sequence: Synthetic oligonucleotide
  misc_feature 1..20: note = Target: ANGPTL4; (+) strand; PAM type: NRG; PAM sequence: GGG
  source 1..20: mol_type = other DNA
agggtataggggaatgggta

SEQ ID NO: 10425 - DNA, 20 bp, synthetic construct
  misc_feature 1..20: note = Description of Artificial Sequence: Synthetic oligonucleotide
  misc_feature 1..20: note = Target: ANGPTL4; (+) strand; PAM type: NRG; PAM sequence: AAG
  source 1..20: mol_type = other DNA
gtataggggaatgggtaggg

SEQ ID NO: 10426 - DNA, 20 bp, synthetic construct
  misc_feature 1..20: note = Description of Artificial Sequence: Synthetic oligonucleotide
  misc_feature 1..20: note = Target: ANGPTL4; (+) strand; PAM type: NRG; PAM sequence: GAG
  source 1..20: mol_type = other DNA
ataggggaatgggtagggaa

SEQ ID NO: 10427 - DNA, 20 bp, synthetic construct
  misc_feature 1..20: note = Description of Artificial Sequence: Synthetic oligonucleotide
  misc_feature 1..20: note = Target: ANGPTL4; (+) strand; PAM type: NRG; PAM sequence: AGG
  source 1..20: mol_type = other DNA
taggggaatgggtagggaag

SEQ ID NO: 10428 - DNA, 20 bp, synthetic construct
  misc_feature 1..20: note = Description of Artificial Sequence: Synthetic oligonucleotide
  misc_feature 1..20: note = Target: ANGPTL4; (+) strand; PAM type: NRG; PAM sequence: CAG
  source 1..20: mol_type = other DNA
gggaatgggtagggaagagg

SEQ ID NO: 10429 - DNA, 20 bp, synthetic construct
  misc_feature 1..20: note = Description of Artificial Sequence: Synthetic oligonucleotide
  misc_feature 1..20: note = Target: ANGPTL4; (+) strand; PAM type: NRG; PAM sequence: GAG
  source 1..20: mol_type = other DNA
gaatgggtagggaagaggca

SEQ ID NO: 10430 - DNA, 20 bp, synthetic construct
  misc_feature 1..20: note = Description of Artificial Sequence: Synthetic oligonucleotide
  misc_feature 1..20: note = Target: ANGPTL4; (+) strand; PAM type: NRG; PAM sequence: AGG
  source 1..20: mol_type = other DNA
aatgggtagggaagaggcag

SEQ ID NO: 10431 - DNA, 20 bp, synthetic construct
  misc_feature 1..20: note = Description of Artificial Sequence: Synthetic oligonucleotide
  misc_feature 1..20: note = Target: ANGPTL4; (+) strand; PAM type: NRG; PAM sequence: GAG
  source 1..20: mol_type = other DNA
tgggtagggaagaggcagag

SEQ ID NO: 10432 - DNA, 20 bp, synthetic construct
  misc_feature 1..20: note = Description of Artificial Sequence: Synthetic oligonucleotide
  misc_feature 1..20: note = Target: ANGPTL4; (+) strand; PAM type: NRG; PAM sequence: CGG
  source 1..20: mol_type = other DNA
agggaagaggcagaggagat

SEQ ID NO: 10433 - DNA, 20 bp, synthetic construct
  misc_feature 1..20: note = Description of Artificial Sequence: Synthetic oligonucleotide
  misc_feature 1..20: note = Target: ANGPTL4; (+) strand; PAM type: NRG; PAM sequence: AAG
  source 1..20: mol_type = other DNA
gaggcagaggagatcggtgc

SEQ ID NO: 10434 - DNA, 20 bp, synthetic construct
  misc_feature 1..20: note = Description of Artificial Sequence: Synthetic oligonucleotide
  misc_feature 1..20: note = Target: ANGPTL4; (+) strand; PAM type: NRG; PAM sequence: TAG
  source 1..20: mol_type = other DNA
tgcaagtttgaatgaacact

SEQ ID NO: 10435 - DNA, 20 bp, synthetic construct
  misc_feature 1..20: note = Description of Artificial Sequence: Synthetic oligonucleotide
  misc_feature 1..20: note = Target: ANGPTL4; (+) strand; PAM type: NRG; PAM sequence: TGG
  source 1..20: mol_type = other DNA
tgaatgaacacttagccctg

SEQ ID NO: 10436 - DNA, 20 bp, synthetic construct
  misc_feature 1..20: note = Description of Artificial Sequence: Synthetic oligonucleotide
  misc_feature 1..20: note = Target: ANGPTL4; (+) strand; PAM type: NRG; PAM sequence: TGG
  source 1..20: mol_type = other DNA
ttagccctgtggaatgaatg

SEQ ID NO: 10437 - DNA, 20 bp, synthetic construct
  misc_feature 1..20: note = Description of Artificial Sequence: Synthetic oligonucleotide
  misc_feature 1..20: note = Target: ANGPTL4; (+) strand; PAM type: NRG; PAM sequence: CAG
  source 1..20: mol_type = other DNA
cctgtggaatgaatgtggtc

SEQ ID NO: 10438 - DNA, 20 bp, synthetic construct
  misc_feature 1..20: note = Description of Artificial Sequence: Synthetic oligonucleotide
  misc_feature 1..20: note = Target: ANGPTL4; (+) strand; PAM type: NRG; PAM sequence: TAG
  source 1..20: mol_type = other DNA
atgaatgtggtccagccctt

SEQ ID NO: 10439 - DNA, 20 bp, synthetic construct
  misc_feature 1..20: note = Description of Artificial Sequence: Synthetic oligonucleotide
  misc_feature 1..20: note = Target: ANGPTL4; (+) strand; PAM type: NRG; PAM sequence: CAG
  source 1..20: mol_type = other DNA
tccagccctttagcctcact

SEQ ID NO: 10440 - DNA, 20 bp, synthetic construct
  misc_feature 1..20: note = Description of Artificial Sequence: Synthetic oligonucleotide
  misc_feature 1..20: note = Target: ANGPTL4; (+) strand; PAM type: NRG; PAM sequence: CAG
  source 1..20: mol_type = other DNA
tcccaactctatccctaccc

SEQ ID NO: 10441 - DNA, 20 bp, synthetic construct
  misc_feature 1..20: note = Description of Artificial Sequence: Synthetic oligonucleotide
  misc_feature 1..20: note = Target: ANGPTL4; (+) strand; PAM type: NRG; PAM sequence: AGG
  source 1..20: mol_type = other DNA
cccaactctatccctacccc

SEQ ID NO: 10442 - DNA, 20 bp, synthetic construct
  misc_feature 1..20: note = Description of Artificial Sequence: Synthetic oligonucleotide
  misc_feature 1..20: note = Target: ANGPTL4; (+) strand; PAM type: NRG; PAM sequence: CAG
  source 1..20: mol_type = other DNA
ctctatccctaccccaggct

SEQ ID NO: 10443 - DNA, 20 bp, synthetic construct
  misc_feature 1..20: note = Description of Artificial Sequence: Synthetic oligonucleotide
  misc_feature 1..20: note = Target: ANGPTL4; (+) strand; PAM type: NRG; PAM sequence: TGG
  source 1..20: mol_type = other DNA
ctaccccaggctcagaatgt

SEQ ID NO: 10444 - DNA, 20 bp, synthetic construct
  misc_feature 1..20: note = Description of Artificial Sequence: Synthetic oligonucleotide
  misc_feature 1..20: note = Target: ANGPTL4; (+) strand; PAM type: NRG; PAM sequence: GGG
  source 1..20: mol_type = other DNA
taccccaggctcagaatgtt

SEQ ID NO: 10445 - DNA, 20 bp, synthetic construct
  misc_feature 1..20: note = Description of Artificial Sequence: Synthetic oligonucleotide
  misc_feature 1..20: note = Target: ANGPTL4; (+) strand; PAM type: NRG; PAM sequence: GGG
  source 1..20: mol_type = other DNA
accccaggctcagaatgttg

SEQ ID NO: 10446 - DNA, 20 bp, synthetic construct
  misc_feature 1..20: note = Description of Artificial Sequence: Synthetic oligonucleotide
  misc_feature 1..20: note = Target: ANGPTL4; (+) strand; PAM type: NRG; PAM sequence: GAG
  source 1..20: mol_type = other DNA
tggggtatctccacctgcct

SEQ ID NO: 10447 - DNA, 20 bp, synthetic construct
  misc_feature 1..20: note = Description of Artificial Sequence: Synthetic oligonucleotide
  misc_feature 1..20: note = Target: ANGPTL4; (+) strand; PAM type: NRG; PAM sequence: CAG
  source 1..20: mol_type = other DNA
gcctgagaacttcaaacata

SEQ ID NO: 10448 - DNA, 20 bp, synthetic construct
  misc_feature 1..20: note = Description of Artificial Sequence: Synthetic oligonucleotide
  misc_feature 1..20: note = Target: ANGPTL4; (+) strand; PAM type: NRG; PAM sequence: AGG
  source 1..20: mol_type = other DNA
cctgagaacttcaaacatac

SEQ ID NO: 10449 - DNA, 20 bp, synthetic construct
  misc_feature 1..20: note = Description of Artificial Sequence: Synthetic oligonucleotide
  misc_feature 1..20: note = Target: ANGPTL4; (+) strand; PAM type: NRG; PAM sequence: GGG
  source 1..20: mol_type = other DNA
ctgagaacttcaaacataca

SEQ ID NO: 10450 - DNA, 20 bp, synthetic construct
  misc_feature 1..20: note = Description of Artificial Sequence: Synthetic oligonucleotide
  misc_feature 1..20: note = Target: ANGPTL4; (+) strand; PAM type: NRG; PAM sequence: GGG
  source 1..20: mol_type = other DNA
tgagaacttcaaacatacag

SEQ ID NO: 10451 - DNA, 20 bp, synthetic construct
  misc_feature 1..20: note = Description of Artificial Sequence: Synthetic oligonucleotide
  misc_feature 1..20: note = Target: ANGPTL4; (+) strand; PAM type: NRG; PAM sequence: TGG
  source 1..20: mol_type = other DNA
aacttcaaacatacaggggc

SEQ ID NO: 10452 - DNA, 20 bp, synthetic construct
  misc_feature 1..20: note = Description of Artificial Sequence: Synthetic oligonucleotide
  misc_feature 1..20: note = Target: ANGPTL4; (+) strand; PAM type: NRG; PAM sequence: GGG
  source 1..20: mol_type = other DNA
acttcaaacatacaggggct

SEQ ID NO: 10453 - DNA, 20 bp, synthetic construct
  misc_feature 1..20: note = Description of Artificial Sequence: Synthetic oligonucleotide
  misc_feature 1..20: note = Target: ANGPTL4; (+) strand; PAM type: NRG; PAM sequence: TAG
  source 1..20: mol_type = other DNA
aaacatacaggggctgggct

SEQ ID NO: 10454 - DNA, 20 bp, synthetic construct
  misc_feature 1..20: note = Description of Artificial Sequence: Synthetic oligonucleotide
  misc_feature 1..20: note = Target: ANGPTL4; (+) strand; PAM type: NRG; PAM sequence: GAG
  source 1..20: mol_type = other DNA
acatacaggggctgggctta

SEQ ID NO: 10455 - DNA, 20 bp, synthetic construct
  misc_feature 1..20: note = Description of Artificial Sequence: Synthetic oligonucleotide
  misc_feature 1..20: note = Target: ANGPTL4; (+) strand; PAM type: NRG; PAM sequence: AGG
  source 1..20: mol_type = other DNA
catacaggggctgggcttag

SEQ ID NO: 10456 - DNA, 20 bp, synthetic construct
  misc_feature 1..20: note = Description of Artificial Sequence: Synthetic oligonucleotide
  misc_feature 1..20: note = Target: ANGPTL4; (+) strand; PAM type: NRG; PAM sequence: GGG
  source 1..20: mol_type = other DNA
atacaggggctgggcttaga

SEQ ID NO: 10457 - DNA, 20 bp, synthetic construct
  misc_feature 1..20: note = Description of Artificial Sequence: Synthetic oligonucleotide
  misc_feature 1..20: note = Target: ANGPTL4; (+) strand; PAM type: NRG; PAM sequence: CAG
  source 1..20: mol_type = other DNA
caggggctgggcttagaggg

SEQ ID NO: 10458 - DNA, 20 bp, synthetic construct
  misc_feature 1..20: note = Description of Artificial Sequence: Synthetic oligonucleotide
  misc_feature 1..20: note = Target: ANGPTL4; (+) strand; PAM type: NRG; PAM sequence: CAG
  source 1..20: mol_type = other DNA
gggctgggcttagagggcag

SEQ ID NO: 10459 - DNA, 20 bp, synthetic construct
  misc_feature 1..20: note = Description of Artificial Sequence: Synthetic oligonucleotide
  misc_feature 1..20: note = Target: ANGPTL4; (+) strand; PAM type: NRG; PAM sequence: CAG
  source 1..20: mol_type = other DNA
agggcagcagcaccttcgtt

SEQ ID NO: 10460 - DNA, 20 bp, synthetic construct
  misc_feature 1..20: note = Description of Artificial Sequence: Synthetic oligonucleotide
  misc_feature 1..20: note = Target: ANGPTL4; (+) strand; PAM type: NRG; PAM sequence: GAG
  source 1..20: mol_type = other DNA
agcaccttcgttcagtgcat

SEQ ID NO: 10461 - DNA, 20 bp, synthetic construct
  misc_feature 1..20: note = Description of Artificial Sequence: Synthetic oligonucleotide
  misc_feature 1..20: note = Target: ANGPTL4; (+) strand; PAM type: NRG; PAM sequence: GAG
  source 1..20: mol_type = other DNA
gcatgagtgaatgaatgaat

SEQ ID NO: 10462 - DNA, 20 bp, synthetic construct
  misc_feature 1..20: note = Description of Artificial Sequence: Synthetic oligonucleotide
  misc_feature 1..20: note = Target: ANGPTL4; (+) strand; PAM type: NRG; PAM sequence: AGG
  source 1..20: mol_type = other DNA
catgagtgaatgaatgaatg

SEQ ID NO: 10463 - DNA, 20 bp, synthetic construct
  misc_feature 1..20: note = Description of Artificial Sequence: Synthetic oligonucleotide
  misc_feature 1..20: note = Target: ANGPTL4; (+) strand; PAM type: NRG; PAM sequence: GGG
  source 1..20: mol_type = other DNA
atgagtgaatgaatgaatga

SEQ ID NO: 10464 - DNA, 20 bp, synthetic construct
  misc_feature 1..20: note = Description of Artificial Sequence: Synthetic oligonucleotide
  misc_feature 1..20: note = Target: ANGPTL4; (+) strand; PAM type: NRG; PAM sequence: GAG
  source 1..20: mol_type = other DNA
gagtgaatgaatgaatgagg

SEQ ID NO: 10465 - DNA, 20 bp, synthetic construct
  misc_feature 1..20: note = Description of Artificial Sequence: Synthetic oligonucleotide
  misc_feature 1..20: note = Target: ANGPTL4; (+) strand; PAM type: NRG; PAM sequence: GAG
  source 1..20: mol_type = other DNA
gtgaatgaatgaatgaggga

SEQ ID NO: 10466 - DNA, 20 bp, synthetic construct
  misc_feature 1..20: note = Description of Artificial Sequence: Synthetic oligonucleotide
  misc_feature 1..20: note = Target: ANGPTL4; (+) strand; PAM type: NRG; PAM sequence: AAG
  source 1..20: mol_type = other DNA
atgaatgaatgagggagaga

SEQ ID NO: 10467 - DNA, 20 bp, synthetic construct
  misc_feature 1..20: note = Description of Artificial Sequence: Synthetic oligonucleotide
  misc_feature 1..20: note = Target: ANGPTL4; (+) strand; PAM type: NRG; PAM sequence: GAG
  source 1..20: mol_type = other DNA
gaatgaatgagggagagaaa

SEQ ID NO: 10468 - DNA, 20 bp, synthetic construct
  misc_feature 1..20: note = Description of Artificial Sequence: Synthetic oligonucleotide
  misc_feature 1..20: note = Target: ANGPTL4; (+) strand; PAM type: NRG; PAM sequence: AGG
  source 1..20: mol_type = other DNA
aatgaatgagggagagaaag

SEQ ID NO: 10469 - DNA, 20 bp, synthetic construct
  misc_feature 1..20: note = Description of Artificial Sequence: Synthetic oligonucleotide
  misc_feature 1..20: note = Target: ANGPTL4; (+) strand; PAM type: NRG; PAM sequence: AAG
  source 1..20: mol_type = other DNA
gaatgagggagagaaagagg

SEQ ID NO: 10470 - DNA, 20 bp, synthetic construct
  misc_feature 1..20: note = Description of Artificial Sequence: Synthetic oligonucleotide
  misc_feature 1..20: note = Target: ANGPTL4; (+) strand; PAM type: NRG; PAM sequence: AGG
  source 1..20: mol_type = other DNA
aatgagggagagaaagagga

SEQ ID NO: 10471 - DNA, 20 bp, synthetic construct
  misc_feature 1..20: note = Description of Artificial Sequence: Synthetic oligonucleotide
  misc_feature 1..20: note = Target: ANGPTL4; (+) strand; PAM type: NRG; PAM sequence: CAG
  source 1..20: mol_type = other DNA
ttttttttttttttgacaca

SEQ ID NO: 10472 - DNA, 20 bp, synthetic construct
  misc_feature 1..20: note = Description of Artificial Sequence: Synthetic oligonucleotide
  misc_feature 1..20: note = Target: ANGPTL4; (+) strand; PAM type: NRG; PAM sequence: CAG
  source 1..20: mol_type = other DNA
cacagtctcactctgtcacc

SEQ ID NO: 10473 - DNA, 20 bp, synthetic construct
  misc_feature 1..20: note = Description of Artificial Sequence: Synthetic oligonucleotide
  misc_feature 1..20: note = Target: ANGPTL4; (+) strand; PAM type: NRG; PAM sequence: AGG
  source 1..20: mol_type = other DNA
acagtctcactctgtcaccc

SEQ ID NO: 10474 - DNA, 20 bp, synthetic construct
  misc_feature 1..20: note = Description of Artificial Sequence: Synthetic oligonucleotide
  misc_feature 1..20: note = Target: ANGPTL4; (+) strand; PAM type: NRG; PAM sequence: TGG
  source 1..20: mol_type = other DNA
tctcactctgtcacccaggc

SEQ ID NO: 10475 - DNA, 20 bp, synthetic construct
  misc_feature 1..20: note = Description of Artificial Sequence: Synthetic oligonucleotide
  misc_feature 1..20: note = Target: ANGPTL4; (+) strand; PAM type: NRG; PAM sequence: GAG
  source 1..20: mol_type = other DNA
tcactctgtcacccaggctg

SEQ ID NO: 10476 - DNA, 20 bp, synthetic construct
  misc_feature 1..20: note = Description of Artificial Sequence: Synthetic oligonucleotide
  misc_feature 1..20: note = Target: ANGPTL4; (+) strand; PAM type: NRG; PAM sequence: TGG
  source 1..20: mol_type = other DNA
tcacccaggctggagtgctg

SEQ ID NO: 10477 - DNA, 20 bp, synthetic construct
  misc_feature 1..20: note = Description of Artificial Sequence: Synthetic oligonucleotide
  misc_feature 1..20: note = Target: ANGPTL4; (+) strand; PAM type: NRG; PAM sequence: CAG
  source 1..20: mol_type = other DNA
ggagtgctgtggtgcaatct

SEQ ID NO: 10478 - DNA, 20 bp, synthetic construct
  misc_feature 1..20: note = Description of Artificial Sequence: Synthetic oligonucleotide
  misc_feature 1..20: note = Target: ANGPTL4; (+) strand; PAM type: NRG; PAM sequence: GAG
  source 1..20: mol_type = other DNA
cactgcaacctccgtctcct

SEQ ID NO: 10479 - DNA, 20 bp, synthetic construct
  misc_feature 1..20: note = Description of Artificial Sequence: Synthetic oligonucleotide
  misc_feature 1..20: note = Target: ANGPTL4; (+) strand; PAM type: NRG; PAM sequence: AAG
  source 1..20: mol_type = other DNA
aacctccgtctcctgagttc

SEQ ID NO: 10480 - DNA, 20 bp, synthetic construct
  misc_feature 1..20: note = Description of Artificial Sequence: Synthetic oligonucleotide
  misc_feature 1..20: note = Target: ANGPTL4; (+) strand; PAM type: NRG; PAM sequence: CAG
  source 1..20: mol_type = other DNA
ttcaagcgattctcctgaca

SEQ ID NO: 10481 - DNA, 20 bp, synthetic construct
  misc_feature 1..20: note = Description of Artificial Sequence: Synthetic oligonucleotide
  misc_feature 1..20: note = Target: ANGPTL4; (+) strand; PAM type: NRG; PAM sequence: GAG
  source 1..20: mol_type = other DNA
ttctcctgacacagtctccc

SEQ ID NO: 10482 - DNA, 20 bp, synthetic construct
  misc_feature 1..20: note = Description of Artificial Sequence: Synthetic oligonucleotide
  misc_feature 1..20: note = Target: ANGPTL4; (+) strand; PAM type: NRG; PAM sequence: TAG
  source 1..20: mol_type = other DNA
tcctgacacagtctcccgag

SEQ ID NO: 10483 - DNA, 20 bp, synthetic construct
  misc_feature 1..20: note = Description of Artificial Sequence: Synthetic oligonucleotide
  misc_feature 1..20: note = Target: ANGPTL4; (+) strand; PAM type: NRG; PAM sequence: AAG
  source 1..20: mol_type = other DNA
acagtctcccgagtagctgt

SEQ ID NO: 10484 - DNA, 20 bp, synthetic construct
  misc_feature 1..20: note = Description of Artificial Sequence: Synthetic oligonucleotide
  misc_feature 1..20: note = Target: ANGPTL4; (+) strand; PAM type: NRG; PAM sequence: CGG
  source 1..20: mol_type = other DNA
taagcacgtgccaccacacc

SEQ ID NO: 10485 - DNA, 20 bp, synthetic construct
  misc_feature 1..20: note = Description of Artificial Sequence: Synthetic oligonucleotide
  misc_feature 1..20: note = Target: ANGPTL4; (+) strand; PAM type: NRG; PAM sequence: TAG
  source 1..20: mol_type = other DNA
cccggctaattttttatttt

SEQ ID NO: 10486 - DNA, 20 bp, synthetic construct
  misc_feature 1..20: note = Description of Artificial Sequence: Synthetic oligonucleotide
  misc_feature 1..20: note = Target: ANGPTL4; (+) strand; PAM type: NRG; PAM sequence: TAG
  source 1..20: mol_type = other DNA
ggctaattttttatttttag

SEQ ID NO: 10487 - DNA, 20 bp, synthetic construct
  misc_feature 1..20: note = Description of Artificial Sequence: Synthetic oligonucleotide
  misc_feature 1..20: note = Target: ANGPTL4; (+) strand; PAM type: NRG; PAM sequence: GAG
  source 1..20: mol_type = other DNA
ctaattttttatttttagta

SEQ ID NO: 10488 - DNA, 20 bp, synthetic construct
  misc_feature 1..20: note = Description of Artificial Sequence: Synthetic oligonucleotide
  misc_feature 1..20: note = Target: ANGPTL4; (+) strand; PAM type: NRG; PAM sequence: GAG
  source 1..20: mol_type = other DNA
tttttatttttagtagagac

SEQ ID NO: 10489 - DNA, 20 bp, synthetic construct
  misc_feature 1..20: note = Description of Artificial Sequence: Synthetic oligonucleotide
  misc_feature 1..20: note = Target: ANGPTL4; (+) strand; PAM type: NRG; PAM sequence: AGG
  source 1..20: mol_type = other DNA
ttttatttttagtagagacg

SEQ ID NO: 10490 - DNA, 20 bp, synthetic construct
  misc_feature 1..20: note = Description of Artificial Sequence: Synthetic oligonucleotide
  misc_feature 1..20: note = Target: ANGPTL4; (+) strand; PAM type: NRG; PAM sequence: TGG
  source 1..20: mol_type = other DNA
gagacgaggtttcaccatgt

SEQ ID NO: 10491 - DNA, 20 bp, synthetic construct
  misc_feature 1..20: note = Description of Artificial Sequence: Synthetic oligonucleotide
  misc_feature 1..20: note = Target: ANGPTL4; (+) strand; PAM type: NRG; PAM sequence: CAG
  source 1..20: mol_type = other DNA
cgaggtttcaccatgttggc

SEQ ID NO: 10492 - DNA, 20 bp, synthetic construct
  misc_feature 1..20: note = Description of Artificial Sequence: Synthetic oligonucleotide
  misc_feature 1..20: note = Target: ANGPTL4; (+) strand; PAM type: NRG; PAM sequence: AGG
  source 1..20: mol_type = other DNA
gaggtttcaccatgttggcc

SEQ ID NO: 10493 - DNA, 20 bp, synthetic construct
  misc_feature 1..20: note = Description of Artificial Sequence: Synthetic oligonucleotide
  misc_feature 1..20: note = Target: ANGPTL4; (+) strand; PAM type: NRG; PAM sequence: CAG
  source 1..20: mol_type = other DNA
tgatctcgaacccctgacct

SEQ ID NO: 10494 - DNA, 20 bp, synthetic construct
  misc_feature 1..20: note = Description of Artificial Sequence: Synthetic oligonucleotide
  misc_feature 1..20: note = Target: ANGPTL4; (+) strand; PAM type: NRG; PAM sequence: AGG
  source 1..20: mol_type = other DNA
gatctcgaacccctgacctc

SEQ ID NO: 10495 - DNA, 20 bp, synthetic construct
  misc_feature 1..20: note = Description of Artificial Sequence: Synthetic oligonucleotide
  misc_feature 1..20: note = Target: ANGPTL4; (+) strand; PAM type: NRG; PAM sequence: CGG
  source 1..20: mol_type = other DNA
cccccccccctcccaccacc

SEQ ID NO: 10496 - DNA, 20 bp, synthetic construct
  misc_feature 1..20: note = Description of Artificial Sequence: Synthetic oligonucleotide
  misc_feature 1..20: note = Target: ANGPTL4; (+) strand; PAM type: NRG; PAM sequence: AAG
  source 1..20: mol_type = other DNA
tcccaccacccggcctccca

SEQ ID NO: 10497 - DNA, 20 bp, synthetic construct
  misc_feature 1..20: note = Description of Artificial Sequence: Synthetic oligonucleotide
  misc_feature 1..20: note = Target: ANGPTL4; (+) strand; PAM type: NRG; PAM sequence: TGG
  source 1..20: mol_type = other DNA
cacccggcctcccaaagtgc

SEQ ID NO: 10498 - DNA, 20 bp, synthetic construct
  misc_feature 1..20: note = Description of Artificial Sequence: Synthetic oligonucleotide
  misc_feature 1..20: note = Target: ANGPTL4; (+) strand; PAM type: NRG; PAM sequence: GGG
  source 1..20: mol_type = other DNA
acccggcctcccaaagtgct

SEQ ID NO: 10499 - DNA, 20 bp, synthetic construct
  misc_feature 1..20: note = Description of Artificial Sequence: Synthetic oligonucleotide
  misc_feature 1..20: note = Target: ANGPTL4; (+) strand; PAM type: NRG; PAM sequence: CAG
  source 1..20: mol_type = other DNA
ctcccaaagtgctgggatta

SEQ ID NO: 10500 - DNA, 20 bp, synthetic construct
  misc_feature 1..20: note = Description of Artificial Sequence: Synthetic oligonucleotide
  misc_feature 1..20: note = Target: ANGPTL4; (+) strand; PAM type: NRG; PAM sequence: AGG
  source 1..20: mol_type = other DNA
tcccaaagtgctgggattac

SEQ ID NO: 10501 - DNA, 20 bp, synthetic construct
  misc_feature 1..20: note = Description of Artificial Sequence: Synthetic oligonucleotide
  misc_feature 1..20: note = Target: ANGPTL4; (+) strand; PAM type: NRG; PAM sequence: GAG
  source 1..20: mol_type = other DNA
agtgctgggattacaggcgt

SEQ ID NO: 10502 - DNA, 20 bp, synthetic construct
  misc_feature 1..20: note = Description of Artificial Sequence: Synthetic oligonucleotide
  misc_feature 1..20: note = Target: ANGPTL4; (+) strand; PAM type: NRG; PAM sequence: TGG
  source 1..20: mol_type = other DNA
caggcgtgagccaccgcgcc

SEQ ID NO: 10503 - DNA, 20 bp, synthetic construct
  misc_feature 1..20: note = Description of Artificial Sequence: Synthetic oligonucleotide
  misc_feature 1..20: note = Target: ANGPTL4; (+) strand; PAM type: NRG; PAM sequence: CAG
  source 1..20: mol_type = other DNA
tgagccaccgcgcctggcca

SEQ ID NO: 10504 - DNA, 20 bp, synthetic construct
  misc_feature 1..20: note = Description of Artificial Sequence: Synthetic oligonucleotide
  misc_feature 1..20: note = Target: ANGPTL4; (+) strand; PAM type: NRG; PAM sequence: TAG
  source 1..20: mol_type = other DNA
cttttattttatttcttttt

SEQ ID NO: 10505 - DNA, 20 bp, synthetic construct
  misc_feature 1..20: note = Description of Artificial Sequence: Synthetic oligonucleotide
  misc_feature 1..20: note = Target: ANGPTL4; (+) strand; PAM type: NRG; PAM sequence: GAG
  source 1..20: mol_type = other DNA
tttattttatttctttttta

SEQ ID NO: 10506 - DNA, 20 bp, synthetic construct
  misc_feature 1..20: note = Description of Artificial Sequence: Synthetic oligonucleotide
  misc_feature 1..20: note = Target: ANGPTL4; (+) strand; PAM type: NRG; PAM sequence: CAG
  source 1..20: mol_type = other DNA
ttttatttcttttttagaga

SEQ ID NO: 10507 - DNA, 20 bp, synthetic construct
  misc_feature 1..20: note = Description of Artificial Sequence: Synthetic oligonucleotide
  misc_feature 1..20: note = Target: ANGPTL4; (+) strand; PAM type: NRG; PAM sequence: AGG
  source 1..20: mol_type = other DNA
tttatttcttttttagagac

SEQ ID NO: 10508 - DNA, 20 bp, synthetic construct
  misc_feature 1..20: note = Description of Artificial Sequence: Synthetic oligonucleotide
  misc_feature 1..20: note = Target: ANGPTL4; (+) strand; PAM type: NRG; PAM sequence: CAG
  source 1..20: mol_type = other DNA
caggatctcactctgttgcc

SEQ ID NO: 10509 - DNA, 20 bp, synthetic construct
  misc_feature 1..20: note = Description of Artificial Sequence: Synthetic oligonucleotide
  misc_feature 1..20: note = Target: ANGPTL4; (+) strand; PAM type: NRG; PAM sequence: AGG
  source 1..20: mol_type = other DNA
aggatctcactctgttgccc

SEQ ID NO: 10510 - DNA, 20 bp, synthetic construct
  misc_feature 1..20: note = Description of Artificial Sequence: Synthetic oligonucleotide
  misc_feature 1..20: note = Target: ANGPTL4; (+) strand; PAM type: NRG; PAM sequence: TGG
  source 1..20: mol_type = other DNA
tctcactctgttgcccaggc

SEQ ID NO: 10511 - DNA, 20 bp, synthetic construct
  misc_feature 1..20: note = Description of Artificial Sequence: Synthetic oligonucleotide
  misc_feature 1..20: note = Target: ANGPTL4; (+) strand; PAM type: NRG; PAM sequence: GAG
  source 1..20: mol_type = other DNA
tcactctgttgcccaggctg

SEQ ID NO: 10512 - DNA, 20 bp, synthetic construct
  misc_feature 1..20: note = Description of Artificial Sequence: Synthetic oligonucleotide
  misc_feature 1..20: note = Target: ANGPTL4; (+) strand; PAM type: NRG; PAM sequence: CAG
  source 1..20: mol_type = other DNA
ctgttgcccaggctggagtg

SEQ ID NO: 10513 - DNA, 20 bp, synthetic construct
  misc_feature 1..20: note = Description of Artificial Sequence: Synthetic oligonucleotide
  misc_feature 1..20: note = Target: ANGPTL4; (+) strand; PAM type: NRG; PAM sequence: TGG
  source 1..20: mol_type = other DNA
ttgcccaggctggagtgcag

SEQ ID NO: 10514 - DNA, 20 bp, synthetic construct
  misc_feature 1..20: note = Description of Artificial Sequence: Synthetic oligonucleotide
  misc_feature 1..20: note = Target: ANGPTL4; (+) strand; PAM type: NRG; PAM sequence: TGG
  source 1..20: mol_type = other DNA
ggagtgcagtggcaccattg

SEQ ID NO: 10515 - DNA, 20 bp, synthetic construct
  misc_feature 1..20: note = Description of Artificial Sequence: Synthetic oligonucleotide
  misc_feature 1..20: note = Target: ANGPTL4; (+) strand; PAM type: NRG; PAM sequence: CAG
  source 1..20: mol_type = other DNA
ggcaccattgtggctcactg

SEQ ID NO: 10516 - DNA, 20 bp, synthetic construct
  misc_feature 1..20: note = Description of Artificial Sequence: Synthetic oligonucleotide
  misc_feature 1..20: note = Target: ANGPTL4; (+) strand; PAM type: NRG; PAM sequence: TGG
  source 1..20: mol_type = other DNA
tcactgcagcctctacctcc

SEQ ID NO: 10517 - DNA, 20 bp, synthetic construct
  misc_feature 1..20: note = Description of Artificial Sequence: Synthetic oligonucleotide
  misc_feature 1..20: note = Target: ANGPTL4; (+) strand; PAM type: NRG; PAM sequence: GGG
  source 1..20: mol_type = other DNA
cactgcagcctctacctcct

SEQ ID NO: 10518 - DNA, 20 bp, synthetic construct
  misc_feature 1..20: note = Description of Artificial Sequence: Synthetic oligonucleotide
  misc_feature 1..20: note = Target: ANGPTL4; (+) strand; PAM type: NRG; PAM sequence: AAG
  source 1..20: mol_type = other DNA
agcctctacctcctgggctc

SEQ ID NO: 10519 - DNA, 20 bp, synthetic construct
  misc_feature 1..20: note = Description of Artificial Sequence: Synthetic oligonucleotide
  misc_feature 1..20: note = Target: ANGPTL4; (+) strand; PAM type: NRG; PAM sequence: GAG
  source 1..20: mol_type = other DNA
tctacctcctgggctcaagt

SEQ ID NO: 10520 - DNA, 20 bp, synthetic construct
  misc_feature 1..20: note = Description of Artificial Sequence: Synthetic oligonucleotide
  misc_feature 1..20: note = Target: ANGPTL4; (+) strand; PAM type: NRG; PAM sequence: CAG
  source 1..20: mol_type = other DNA
ctcaagtgagcctcccacct

SEQ ID NO: 10521 - DNA, 20 bp, synthetic construct
  misc_feature 1..20: note = Description of Artificial Sequence: Synthetic oligonucleotide
  misc_feature 1..20: note = Target: ANGPTL4; (+) strand; PAM type: NRG; PAM sequence: AGG
  source 1..20: mol_type = other DNA
tcaagtgagcctcccacctc

SEQ ID NO: 10522 - DNA, 20 bp, synthetic construct
  misc_feature 1..20: note = Description of Artificial Sequence: Synthetic oligonucleotide
  misc_feature 1..20: note = Target: ANGPTL4; (+) strand; PAM type: NRG; PAM sequence: AAG
  source 1..20: mol_type = other DNA
gcctcccacctcaggctccc

SEQ ID NO: 10523 - DNA, 20 bp, synthetic construct
  misc_feature 1..20: note = Description of Artificial Sequence: Synthetic oligonucleotide
  misc_feature 1..20: note = Target: ANGPTL4; (+) strand; PAM type: NRG; PAM sequence: TAG
  source 1..20: mol_type = other DNA
tcccacctcaggctcccaag

SEQ ID NO: 10524 - DNA, 20 bp, synthetic construct
  misc_feature 1..20: note = Description of Artificial Sequence: Synthetic oligonucleotide
  misc_feature 1..20: note = Target: ANGPTL4; (+) strand; PAM type: NRG; PAM sequence: CAG
  source 1..20: mol_type = other DNA
ctcccaagtagctgcgacca

SEQ ID NO: 10525 - DNA, 20 bp, synthetic construct
  misc_feature 1..20: note = Description of Artificial Sequence: Synthetic oligonucleotide
  misc_feature 1..20: note = Target: ANGPTL4; (+) strand; PAM type: NRG; PAM sequence: TGG
  source 1..20: mol_type = other DNA
agtagctgcgaccacagtca

SEQ ID NO: 10526 - DNA, 20 bp, synthetic construct
  misc_feature 1..20: note = Description of Artificial Sequence: Synthetic oligonucleotide
  misc_feature 1..20: note = Target: ANGPTL4; (+) strand; PAM type: NRG; PAM sequence: GGG
  source 1..20: mol_type = other DNA
gtagctgcgaccacagtcat

SEQ ID NO: 10527 - DNA, 20 bp, synthetic construct
  misc_feature 1..20: note = Description of Artificial Sequence: Synthetic oligonucleotide
  misc_feature 1..20: note = Target: ANGPTL4; (+) strand; PAM type: NRG; PAM sequence: TGG
  source 1..20: mol_type = other DNA
acagtcatgggcgaccgccc

SEQ ID NO: 10528 - DNA, 20 bp, synthetic construct
  misc_feature 1..20: note = Description of Artificial Sequence: Synthetic oligonucleotide
  misc_feature 1..20: note = Target: ANGPTL4; (+) strand; PAM type: NRG; PAM sequence: AAG
  source 1..20: mol_type = other DNA
gtctcctctttctgttctct

SEQ ID NO: 10529 - DNA, 20 bp, synthetic construct
  misc_feature 1..20: note = Description of Artificial Sequence: Synthetic oligonucleotide
  misc_feature 1..20: note = Target: ANGPTL4; (+) strand; PAM type: NRG; PAM sequence: TAG
  source 1..20: mol_type = other DNA
tctaagttcctgctttatta

SEQ ID NO: 10530 - DNA, 20 bp, synthetic construct
  misc_feature 1..20: note = Description of Artificial Sequence: Synthetic oligonucleotide
  misc_feature 1..20: note = Target: ANGPTL4; (+) strand; PAM type: NRG; PAM sequence: AGG
  source 1..20: mol_type = other DNA
ctaagttcctgctttattat

SEQ ID NO: 10531 - DNA, 20 bp, synthetic construct
  misc_feature 1..20: note = Description of Artificial Sequence: Synthetic oligonucleotide
  misc_feature 1..20: note = Target: ANGPTL4; (+) strand; PAM type: NRG; PAM sequence: AAG
  source 1..20: mol_type = other DNA
ttcctgctttattataggca

SEQ ID NO: 10532 - DNA, 20 bp, synthetic construct
  misc_feature 1..20: note = Description of Artificial Sequence: Synthetic oligonucleotide
  misc_feature 1..20: note = Target: ANGPTL4; (+) strand; PAM type: NRG; PAM sequence: CAG
  source 1..20: mol_type = other DNA
gctttattataggcaaagct

SEQ ID NO: 10533 - DNA, 20 bp, synthetic construct
  misc_feature 1..20: note = Description of Artificial Sequence: Synthetic oligonucleotide
  misc_feature 1..20: note = Target: ANGPTL4; (+) strand; PAM type: NRG; PAM sequence: AGG
  source 1..20: mol_type = other DNA
ctttattataggcaaagctc

SEQ ID NO: 10534 - DNA, 20 bp, synthetic construct
  misc_feature 1..20: note = Description of Artificial Sequence: Synthetic oligonucleotide
  misc_feature 1..20: note = Target: ANGPTL4; (+) strand; PAM type: NRG; PAM sequence: AAG
  source 1..20: mol_type = other DNA
aggcaaagctcaggacatta

SEQ ID NO: 10535 - DNA, 20 bp, synthetic construct
  misc_feature 1..20: note = Description of Artificial Sequence: Synthetic oligonucleotide
  misc_feature 1..20: note = Target: ANGPTL4; (+) strand; PAM type: NRG; PAM sequence: TGG
  source 1..20: mol_type = other DNA
gctcaggacattaaagaccc

SEQ ID NO: 10536 - DNA, 20 bp, synthetic construct
  misc_feature 1..20: note = Description of Artificial Sequence: Synthetic oligonucleotide
  misc_feature 1..20: note = Target: ANGPTL4; (+) strand; PAM type: NRG; PAM sequence: CGG
  source 1..20: mol_type = other DNA
caggacattaaagaccctgg

SEQ ID NO: 10537 - DNA, 20 bp, synthetic construct
  misc_feature 1..20: note = Description of Artificial Sequence: Synthetic oligonucleotide
  misc_feature 1..20: note = Target: ANGPTL4; (+) strand; PAM type: NRG; PAM sequence: TAG
  source 1..20: mol_type = other DNA
gacattaaagaccctggcgg

SEQ ID NO: 10538 - DNA, 20 bp, synthetic construct
  misc_feature 1..20: note = Description of Artificial Sequence: Synthetic oligonucleotide
  misc_feature 1..20: note = Target: ANGPTL4; (+) strand; PAM type: NRG; PAM sequence: GAG
  source 1..20: mol_type = other DNA
cattaaagaccctggcggta

SEQ ID NO: 10539 - DNA, 20 bp, synthetic construct
  misc_feature 1..20: note = Description of Artificial Sequence: Synthetic oligonucleotide
  misc_feature 1..20: note = Target: ANGPTL4; (+) strand; PAM type: NRG; PAM sequence: AGG
  source 1..20: mol_type = other DNA
attaaagaccctggcggtag

SEQ ID NO: 10540 - DNA, 20 bp, synthetic construct
  misc_feature 1..20: note = Description of Artificial Sequence: Synthetic oligonucleotide
  misc_feature 1..20: note = Target: ANGPTL4; (+) strand; PAM type: NRG; PAM sequence: GGG
  source 1..20: mol_type = other DNA
ttaaagaccctggcggtaga

SEQ ID NO: 10541 - DNA, 20 bp, synthetic construct
  misc_feature 1..20: note = Description of Artificial Sequence: Synthetic oligonucleotide
  misc_feature 1..20: note = Target: ANGPTL4; (+) strand; PAM type: NRG; PAM sequence: TAG
  source 1..20: mol_type = other DNA
aagaccctggcggtagaggg

SEQ ID NO: 10542 - DNA, 20 bp, synthetic construct
  misc_feature 1..20: note = Description of Artificial Sequence: Synthetic oligonucleotide
  misc_feature 1..20: note = Target: ANGPTL4; (+) strand; PAM type: NRG; PAM sequence: AGG
  source 1..20: mol_type = other DNA
agaccctggcggtagagggt

SEQ ID NO: 10543 - DNA, 20 bp, synthetic construct
  misc_feature 1..20: note = Description of Artificial Sequence: Synthetic oligonucleotide
  misc_feature 1..20: note = Target: ANGPTL4; (+) strand; PAM type: NRG; PAM sequence: TGG
  source 1..20: mol_type = other DNA
tggcggtagagggtaggcta

SEQ ID NO: 10544 - DNA, 20 bp, synthetic construct
  misc_feature 1..20: note = Description of Artificial Sequence: Synthetic oligonucleotide
  misc_feature 1..20: note = Target: ANGPTL4; (+) strand; PAM type: NRG; PAM sequence: GGG
  source 1..20: mol_type = other DNA
ggcggtagagggtaggctat

SEQ ID NO: 10545 - DNA, 20 bp, synthetic construct
  misc_feature 1..20: note = Description of Artificial Sequence: Synthetic oligonucleotide
  misc_feature 1..20: note = Target: ANGPTL4; (+) strand; PAM type: NRG; PAM sequence: GGG
  source 1..20: mol_type = other DNA
gcggtagagggtaggctatg

SEQ ID NO: 10546 - DNA, 20 bp, synthetic construct
  misc_feature 1..20: note = Description of Artificial Sequence: Synthetic oligonucleotide
  misc_feature 1..20: note = Target: ANGPTL4; (+) strand; PAM type: NRG; PAM sequence: GGG
  source 1..20: mol_type = other DNA
cggtagagggtaggctatgg

SEQ ID NO: 10547 - DNA, 20 bp, synthetic construct
  misc_feature 1..20: note = Description of Artificial Sequence: Synthetic oligonucleotide
  misc_feature 1..20: note = Target: ANGPTL4; (+) strand; PAM type: NRG; PAM sequence: GAG
  source 1..20: mol_type = other DNA
agagggtaggctatgggggt

SEQ ID NO: 10548 - DNA, 20 bp, synthetic construct
  misc_feature 1..20: note = Description of Artificial Sequence: Synthetic oligonucleotide
  misc_feature 1..20: note = Target: ANGPTL4; (+) strand; PAM type: NRG; PAM sequence: AGG
  source 1..20: mol_type = other DNA
gagggtaggctatgggggtg

SEQ ID NO: 10549 - DNA, 20 bp, synthetic construct
  misc_feature 1..20: note = Description of Artificial Sequence: Synthetic oligonucleotide
  misc_feature 1..20: note = Target: ANGPTL4; (+) strand; PAM type: NRG; PAM sequence: AAG
  source 1..20: mol_type = other DNA
tgggggtgaggccctgatcc

SEQ ID NO: 10550 - DNA, 20 bp, synthetic construct
  misc_feature 1..20: note = Description of Artificial Sequence: Synthetic oligonucleotide
  misc_feature 1..20: note = Target: ANGPTL4; (+) strand; PAM type: NRG; PAM sequence: AAG
  source 1..20: mol_type = other DNA
ctgatccaagtcctgccgct

SEQ ID NO: 10551 - DNA, 20 bp, synthetic construct
  misc_feature 1..20: note = Description of Artificial Sequence: Synthetic oligonucleotide
  misc_feature 1..20: note = Target: ANGPTL4; (+) strand; PAM type: NRG; PAM sequence: AGG
  source 1..20: mol_type = other DNA
tgatccaagtcctgccgcta

SEQ ID NO: 10552 - DNA, 20 bp, synthetic construct
  misc_feature 1..20: note = Description of Artificial Sequence: Synthetic oligonucleotide
  misc_feature 1..20: note = Target: ANGPTL4; (+) strand; PAM type: NRG; PAM sequence: CGG
  source 1..20: mol_type = other DNA
cgctaaggcactcataattt

SEQ ID NO: 10553 - DNA, 20 bp, synthetic construct
  misc_feature 1..20: note = Description of Artificial Sequence: Synthetic oligonucleotide
  misc_feature 1..20: note = Target: ANGPTL4; (+) strand; PAM type: NRG; PAM sequence: GGG
  source 1..20: mol_type = other DNA
gctaaggcactcataatttc

SEQ ID NO: 10554 - DNA, 20 bp, synthetic construct
  misc_feature 1..20: note = Description of Artificial Sequence: Synthetic oligonucleotide
  misc_feature 1..20: note = Target: ANGPTL4; (+) strand; PAM type: NRG; PAM sequence: CAG
  source 1..20: mol_type = other DNA
ggcactcataatttcgggct

SEQ ID NO: 10555 - DNA, 20 bp, synthetic construct
  misc_feature 1..20: note = Description of Artificial Sequence: Synthetic oligonucleotide
  misc_feature 1..20: note = Target: ANGPTL4; (+) strand; PAM type: NRG; PAM sequence: AGG
  source 1..20: mol_type = other DNA
gcactcataatttcgggctc

SEQ ID NO: 10556 - DNA, 20 bp, synthetic construct
  misc_feature 1..20: note = Description of Artificial Sequence: Synthetic oligonucleotide
  misc_feature 1..20: note = Target: ANGPTL4; (+) strand; PAM type: NRG; PAM sequence: GGG
  source 1..20: mol_type = other DNA
cactcataatttcgggctca

SEQ ID NO: 10557 - DNA, 20 bp, synthetic construct
  misc_feature 1..20: note = Description of Artificial Sequence: Synthetic oligonucleotide
  misc_feature 1..20: note = Target: ANGPTL4; (+) strand; PAM type: NRG; PAM sequence: GGG
  source 1..20: mol_type = other DNA
actcataatttcgggctcag

SEQ ID NO: 10558 - DNA, 20 bp, synthetic construct
  misc_feature 1..20: note = Description of Artificial Sequence: Synthetic oligonucleotide
  misc_feature 1..20: note = Target: ANGPTL4; (+) strand; PAM type: NRG; PAM sequence: GAG
  source 1..20: mol_type = other DNA
tcataatttcgggctcaggg

SEQ ID NO: 10559 - DNA, 20 bp, synthetic construct
  misc_feature 1..20: note = Description of Artificial Sequence: Synthetic oligonucleotide
  misc_feature 1..20: note = Target: ANGPTL4; (+) strand; PAM type: NRG; PAM sequence: TGG
  source 1..20: mol_type = other DNA
tttcgggctcaggggagaaa

SEQ ID NO: 10560 - DNA, 20 bp, synthetic construct
  misc_feature 1..20: note = Description of Artificial Sequence: Synthetic oligonucleotide
  misc_feature 1..20: note = Target: ANGPTL4; (+) strand; PAM type: NRG; PAM sequence: AAG
  source 1..20: mol_type = other DNA
cgggctcaggggagaaatgg

SEQ ID NO: 10561 - DNA, 20 bp, synthetic construct
  misc_feature 1..20: note = Description of Artificial Sequence: Synthetic oligonucleotide
  misc_feature 1..20: note = Target: ANGPTL4; (+) strand; PAM type: NRG; PAM sequence: AAG
  source 1..20: mol_type = other DNA
caggggagaaatggaagtca

SEQ ID NO: 10562 - DNA, 20 bp, synthetic construct
  misc_feature 1..20: note = Description of Artificial Sequence: Synthetic oligonucleotide
  misc_feature 1..20: note = Target: ANGPTL4; (+) strand; PAM type: NRG; PAM sequence: CAG
  source 1..20: mol_type = other DNA
gtcaaagaatctcataaaca

SEQ ID NO: 10563 - DNA, 20 bp, synthetic construct
  misc_feature 1..20: note = Description of Artificial Sequence: Synthetic oligonucleotide
  misc_feature 1..20: note = Target: ANGPTL4; (+) strand; PAM type: NRG; PAM sequence: CGG
  source 1..20: mol_type = other DNA
tgcgatgacgaaccctttca

SEQ ID NO: 10564 - DNA, 20 bp, synthetic construct
  misc_feature 1..20: note = Description of Artificial Sequence: Synthetic oligonucleotide
  misc_feature 1..20: note = Target: ANGPTL4; (+) strand; PAM type: NRG; PAM sequence: GGG
  source 1..20: mol_type = other DNA
gcgatgacgaaccctttcac

SEQ ID NO: 10565 - DNA, 20 bp, synthetic construct
  misc_feature 1..20: note = Description of Artificial Sequence: Synthetic oligonucleotide
  misc_feature 1..20: note = Target: ANGPTL4; (+) strand; PAM type: NRG; PAM sequence: AAG
  source 1..20: mol_type = other DNA
atgacgaaccctttcacggg

SEQ ID NO: 10566 - DNA, 20 bp, synthetic construct
  misc_feature 1..20: note = Description of Artificial Sequence: Synthetic oligonucleotide
  misc_feature 1..20: note = Target: ANGPTL4; (+) strand; PAM type: NRG; PAM sequence: AGG
  source 1..20: mol_type = other DNA
tgacgaaccctttcacggga

SEQ ID NO: 10567 - DNA, 20 bp, synthetic construct
  misc_feature 1..20: note = Description of Artificial Sequence: Synthetic oligonucleotide
  misc_feature 1..20: note = Target: ANGPTL4; (+) strand; PAM type: NRG; PAM sequence: GAG
  source 1..20: mol_type = other DNA
tttcacgggaaggaacatgc

SEQ ID NO: 10568 - DNA, 20 bp, synthetic construct
  misc_feature 1..20: note = Description of Artificial Sequence: Synthetic oligonucleotide
  misc_feature 1..20: note = Target: ANGPTL4; (+) strand; PAM type: NRG; PAM sequence: CAG
  source 1..20: mol_type = other DNA
cgggaaggaacatgcgagcc

SEQ ID NO: 10569 - DNA, 20 bp, synthetic construct
  misc_feature 1..20: note = Description of Artificial Sequence: Synthetic oligonucleotide
  misc_feature 1..20: note = Target: ANGPTL4; (+) strand; PAM type: NRG; PAM sequence: AAG
  source 1..20: mol_type = other DNA
aggaacatgcgagcccagaa

SEQ ID NO: 10570 - DNA, 20 bp, synthetic construct
  misc_feature 1..20: note = Description of Artificial Sequence: Synthetic oligonucleotide
  misc_feature 1..20: note = Target: ANGPTL4; (+) strand; PAM type: NRG; PAM sequence: TGG
  source 1..20: mol_type = other DNA
gagcccagaaaagtctctcc

SEQ ID NO: 10571 - DNA, 20 bp, synthetic construct
  misc_feature 1..20: note = Description of Artificial Sequence: Synthetic oligonucleotide
  misc_feature 1..20: note = Target: ANGPTL4; (+) strand; PAM type: NRG; PAM sequence: TGG
  source 1..20: mol_type = other DNA
agaaaagtctctcctggtct

SEQ ID NO: 10572 - DNA, 20 bp, synthetic construct
  misc_feature 1..20: note = Description of Artificial Sequence: Synthetic oligonucleotide
  misc_feature 1..20: note = Target: ANGPTL4; (+) strand; PAM type: NRG; PAM sequence: GGG
  source 1..20: mol_type = other DNA
gaaaagtctctcctggtctt

SEQ ID NO: 10573 - DNA, 20 bp, synthetic construct
  misc_feature 1..20: note = Description of Artificial Sequence: Synthetic oligonucleotide
  misc_feature 1..20: note = Target: ANGPTL4; (+) strand; PAM type: NRG; PAM sequence: TGG
  source 1..20: mol_type = other DNA
agtctctcctggtcttggga

SEQ ID NO: 10574 - DNA, 20 bp, synthetic construct
  misc_feature 1..20: note = Description of Artificial Sequence: Synthetic oligonucleotide
  misc_feature 1..20: note = Target: ANGPTL4; (+) strand; PAM type: NRG; PAM sequence: GAG
  source 1..20: mol_type = other DNA
tctctcctggtcttgggatg

SEQ ID NO: 10575 - DNA, 20 bp, synthetic construct
  misc_feature 1..20: note = Description of Artificial Sequence: Synthetic oligonucleotide
  misc_feature 1..20: note = Target: ANGPTL4; (+) strand; PAM type: NRG; PAM sequence: AGG
  source 1..20: mol_type = other DNA
ctctcctggtcttgggatgg

SEQ ID NO: 10576 - DNA, 20 bp, synthetic construct
  misc_feature 1..20: note = Description of Artificial Sequence: Synthetic oligonucleotide
  misc_feature 1..20: note = Target: ANGPTL4; (+) strand; PAM type: NRG; PAM sequence: AAG
  source 1..20: mol_type = other DNA
cttgggatggaggtcacacg

SEQ ID NO: 10577 - DNA, 20 bp, synthetic construct
  misc_feature 1..20: note = Description of Artificial Sequence: Synthetic oligonucleotide
  misc_feature 1..20: note = Target: ANGPTL4; (+) strand; PAM type: NRG; PAM sequence: AAG
  source 1..20: mol_type = other DNA
aggtcacacgaagcctccgc

SEQ ID NO: 10578 - DNA, 20 bp, synthetic construct
  misc_feature 1..20: note = Description of Artificial Sequence: Synthetic oligonucleotide
  misc_feature 1..20: note = Target: ANGPTL4; (+) strand; PAM type: NRG; PAM sequence: AGG
  source 1..20: mol_type = other DNA
ggtcacacgaagcctccgca

SEQ ID NO: 10579 - DNA, 20 bp, synthetic construct
  misc_feature 1..20: note = Description of Artificial Sequence: Synthetic oligonucleotide
  misc_feature 1..20: note = Target: ANGPTL4; (+) strand; PAM type: NRG; PAM sequence: AAG
  source 1..20: mol_type = other DNA
acacgaagcctccgcaaggc

SEQ ID NO: 10580 - DNA, 20 bp, synthetic construct
  misc_feature 1..20: note = Description of Artificial Sequence: Synthetic oligonucleotide
  misc_feature 1..20: note = Target: ANGPTL4; (+) strand; PAM type: NRG; PAM sequence: AGG
  source 1..20: mol_type = other DNA
cacgaagcctccgcaaggca

SEQ ID NO: 10581 - DNA, 20 bp, synthetic construct
  misc_feature 1..20: note = Description of Artificial Sequence: Synthetic oligonucleotide
  misc_feature 1..20: note = Target: ANGPTL4; (+) strand; PAM type: NRG; PAM sequence: TGG
  source 1..20: mol_type = other DNA
ctccgcaaggcaaggacttt

SEQ ID NO: 10582 - DNA, 20 bp, synthetic construct
  misc_feature 1..20: note = Description of Artificial Sequence: Synthetic oligonucleotide
  misc_feature 1..20: note = Target: ANGPTL4; (+) strand; PAM type: NRG; PAM sequence: GAG
  source 1..20: mol_type = other DNA
gcaaggcaaggacttttggt

SEQ ID NO: 10583 - DNA, 20 bp, synthetic construct
  misc_feature 1..20: note = Description of Artificial Sequence: Synthetic oligonucleotide
  misc_feature 1..20: note = Target: ANGPTL4; (+) strand; PAM type: NRG; PAM sequence: CGG
  source 1..20: mol_type = other DNA
caaggacttttggtgagttc

SEQ ID NO: 10584 - DNA, 20 bp, synthetic construct
  misc_feature 1..20: note = Description of Artificial Sequence: Synthetic oligonucleotide
  misc_feature 1..20: note = Target: ANGPTL4; (+) strand; PAM type: NRG; PAM sequence: GGG
  source 1..20: mol_type = other DNA
aaggacttttggtgagttcc

SEQ ID NO: 10585 - DNA, 20 bp, synthetic construct
  misc_feature 1..20: note = Description of Artificial Sequence: Synthetic oligonucleotide
  misc_feature 1..20: note = Target: ANGPTL4; (+) strand; PAM type: NRG; PAM sequence: CAG
  source 1..20: mol_type = other DNA
gttccgggctccgctgaact

SEQ ID NO: 10586 - DNA, 20 bp, synthetic construct
  misc_feature 1..20: note = Description of Artificial Sequence: Synthetic oligonucleotide
  misc_feature 1..20: note = Target: ANGPTL4; (+) strand; PAM type: NRG; PAM sequence: GAG
  source 1..20: mol_type = other DNA
cttttctcttctttcatttt

SEQ ID NO: 10587 - DNA, 20 bp, synthetic construct
  misc_feature 1..20: note = Description of Artificial Sequence: Synthetic oligonucleotide
  misc_feature 1..20: note = Target: ANGPTL4; (+) strand; PAM type: NRG; PAM sequence: TGG
  source 1..20: mol_type = other DNA
tttcattttgagacgtactc

SEQ ID NO: 10588 - DNA, 20 bp, synthetic construct
  misc_feature 1..20: note = Description of Artificial Sequence: Synthetic oligonucleotide
  misc_feature 1..20: note = Target: ANGPTL4; (+) strand; PAM type: NRG; PAM sequence: CAG
  source 1..20: mol_type = other DNA
cgtactctggctctgtcgcc

SEQ ID NO: 10589 - DNA, 20 bp, synthetic construct
  misc_feature 1..20: note = Description of Artificial Sequence: Synthetic oligonucleotide
  misc_feature 1..20: note = Target: ANGPTL4; (+) strand; PAM type: NRG; PAM sequence: AGG
  source 1..20: mol_type = other DNA
gtactctggctctgtcgccc

SEQ ID NO: 10590 - DNA, 20 bp, synthetic construct
  misc_feature 1..20: note = Description of Artificial Sequence: Synthetic oligonucleotide
  misc_feature 1..20: note = Target: ANGPTL4; (+) strand; PAM type: NRG; PAM sequence: TGG
  source 1..20: mol_type = other DNA
tctggctctgtcgcccaggc

SEQ ID NO: 10591 - DNA, 20 bp, synthetic construct
  misc_feature 1..20: note = Description of Artificial Sequence: Synthetic oligonucleotide
  misc_feature 1..20: note = Target: ANGPTL4; (+) strand; PAM type: NRG; PAM sequence: GAG
  source 1..20: mol_type = other DNA
tggctctgtcgcccaggctg

SEQ ID NO: 10592 - DNA, 20 bp, synthetic construct
  misc_feature 1..20: note = Description of Artificial Sequence: Synthetic oligonucleotide
  misc_feature 1..20: note = Target: ANGPTL4; (+) strand; PAM type: NRG; PAM sequence: TGG
  source 1..20: mol_type = other DNA
tcgcccaggctggagcgcaa

SEQ ID NO: 10593 - DNA, 20 bp, synthetic construct
  misc_feature 1..20: note = Description of Artificial Sequence: Synthetic oligonucleotide
  misc_feature 1..20: note = Target: ANGPTL4; (+) strand; PAM type: NRG; PAM sequence: CGG
  source 1..20: mol_type = other DNA
ggagcgcaatggcgccatct

SEQ ID NO: 10594 - DNA, 20 bp, synthetic construct
  misc_feature 1..20: note = Description of Artificial Sequence: Synthetic oligonucleotide
  misc_feature 1..20: note = Target: ANGPTL4; (+) strand; PAM type: NRG; PAM sequence: CGG
  source 1..20: mol_type = other DNA
gcactgcaacctccacctcc

SEQ ID NO: 10595 - DNA, 20 bp, synthetic construct
  misc_feature 1..20: note = Description of Artificial Sequence: Synthetic oligonucleotide
  misc_feature 1..20: note = Target: ANGPTL4; (+) strand; PAM type: NRG; PAM sequence: GGG
  source 1..20: mol_type = other DNA
cactgcaacctccacctccc

SEQ ID NO: 10596 - DNA, 20 bp, synthetic construct
  misc_feature 1..20: note = Description of Artificial Sequence: Synthetic oligonucleotide
  misc_feature 1..20: note = Target: ANGPTL4; (+) strand; PAM type: NRG; PAM sequence: AAG
  source 1..20: mol_type = other DNA
aacctccacctcccgggttc

SEQ ID NO: 10597 - DNA, 20 bp, synthetic construct
  misc_feature 1..20: note = Description of Artificial Sequence: Synthetic oligonucleotide
  misc_feature 1..20: note = Target: ANGPTL4; (+) strand; PAM type: NRG; PAM sequence: CAG
  source 1..20: mol_type = other DNA
ttcaagcgattctactgcct

SEQ ID NO: 10598 - DNA, 20 bp, synthetic construct
  misc_feature 1..20: note = Description of Artificial Sequence: Synthetic oligonucleotide
  misc_feature 1..20: note = Target: ANGPTL4; (+) strand; PAM type: NRG; PAM sequence: GAG
  source 1..20: mol_type = other DNA
ttctactgcctcagcctccc

SEQ ID NO: 10599 - DNA, 20 bp, synthetic construct
  misc_feature 1..20: note = Description of Artificial Sequence: Synthetic oligonucleotide
  misc_feature 1..20: note = Target: ANGPTL4; (+) strand; PAM type: NRG; PAM sequence: TAG
  source 1..20: mol_type = other DNA
tactgcctcagcctcccgag

SEQ ID NO: 10600 - DNA, 20 bp, synthetic construct
  misc_feature 1..20: note = Description of Artificial Sequence: Synthetic oligonucleotide
  misc_feature 1..20: note = Target: ANGPTL4; (+) strand; PAM type: NRG; PAM sequence: TGG
  source 1..20: mol_type = other DNA
gcctcagcctcccgagtagc

SEQ ID NO: 10601 - DNA, 20 bp, synthetic construct
  misc_feature 1..20: note = Description of Artificial Sequence: Synthetic oligonucleotide
  misc_feature 1..20: note = Target: ANGPTL4; (+) strand; PAM type: NRG; PAM sequence: GGG
  source 1..20: mol_type = other DNA
cctcagcctcccgagtagct

SEQ ID NO: 10602 - DNA, 20 bp, synthetic construct
  misc_feature 1..20: note = Description of Artificial Sequence: Synthetic oligonucleotide
  misc_feature 1..20: note = Target: ANGPTL4; (+) strand; PAM type: NRG; PAM sequence: CAG
  source 1..20: mol_type = other DNA
ctcccgagtagctgggacta

SEQ ID NO: 10603 - DNA, 20 bp, synthetic construct
  misc_feature 1..20: note = Description of Artificial Sequence: Synthetic oligonucleotide
  misc_feature 1..20: note = Target: ANGPTL4; (+) strand; PAM type: NRG; PAM sequence: AGG
  source 1..20: mol_type = other DNA
tcccgagtagctgggactac

SEQ ID NO: 10604 - DNA, 20 bp, synthetic construct
  misc_feature 1..20: note = Description of Artificial Sequence: Synthetic oligonucleotide
  misc_feature 1..20: note = Target: ANGPTL4; (+) strand; PAM type: NRG; PAM sequence: AAG
  source 1..20: mol_type = other DNA
gactacaggcgcgcactacc

SEQ ID NO: 10605 - DNA, 20 bp, synthetic construct
  misc_feature 1..20: note = Description of Artificial Sequence: Synthetic oligonucleotide
  misc_feature 1..20: note = Target: ANGPTL4; (+) strand; PAM type: NRG; PAM sequence: CGG
  source 1..20: mol_type = other DNA
caggcgcgcactaccaagcc

SEQ ID NO: 10606 - DNA, 20 bp, synthetic construct
  misc_feature 1..20: note = Description of Artificial Sequence: Synthetic oligonucleotide
  misc_feature 1..20: note = Target: ANGPTL4; (+) strand; PAM type: NRG; PAM sequence: TAG
  source 1..20: mol_type = other DNA
ctaatttttttttgtatttt

SEQ ID NO: 10607 - DNA, 20 bp, synthetic construct
  misc_feature 1..20: note = Description of Artificial Sequence: Synthetic oligonucleotide
  misc_feature 1..20: note = Target: ANGPTL4; (+) strand; PAM type: NRG; PAM sequence: TAG
  source 1..20: mol_type = other DNA
atttttttttgtatttttag

SEQ ID NO: 10608 - DNA, 20 bp, synthetic construct
  misc_feature 1..20: note = Description of Artificial Sequence: Synthetic oligonucleotide
  misc_feature 1..20: note = Target: ANGPTL4; (+) strand; PAM type: NRG; PAM sequence: GAG
  source 1..20: mol_type = other DNA
ttttttttgtatttttagta

SEQ ID NO: 10609 - DNA, 20 bp, synthetic construct
  misc_feature 1..20: note = Description of Artificial Sequence: Synthetic oligonucleotide
  misc_feature 1..20: note = Target: ANGPTL4; (+) strand; PAM type: NRG; PAM sequence: TGG
  source 1..20: mol_type = other DNA
tttgtatttttagtagagac

SEQ ID NO: 10610 - DNA, 20 bp, synthetic construct
  misc_feature 1..20: note = Description of Artificial Sequence: Synthetic oligonucleotide
  misc_feature 1..20: note = Target: ANGPTL4; (+) strand; PAM type: NRG; PAM sequence: GGG
  source 1..20: mol_type = other DNA
ttgtatttttagtagagact

SEQ ID NO: 10611 - DNA, 20 bp, synthetic construct
  misc_feature 1..20: note = Description of Artificial Sequence: Synthetic oligonucleotide
  misc_feature 1..20: note = Target: ANGPTL4; (+) strand; PAM type: NRG; PAM sequence: TGG
  source 1..20: mol_type = other DNA
gagactgggtttcacgatgt

SEQ ID NO: 10612 - DNA, 20 bp, synthetic construct
  misc_feature 1..20: note = Description of Artificial Sequence: Synthetic oligonucleotide
  misc_feature 1..20: note = Target: ANGPTL4; (+) strand; PAM type: NRG; PAM sequence: CGG
  source 1..20: mol_type = other DNA
ctgggtttcacgatgttggc

SEQ ID NO: 10613 - DNA, 20 bp, synthetic construct
  misc_feature 1..20: note = Description of Artificial Sequence: Synthetic oligonucleotide
  misc_feature 1..20: note = Target: ANGPTL4; (+) strand; PAM type: NRG; PAM sequence: GGG
  source 1..20: mol_type = other DNA
tgggtttcacgatgttggcc

SEQ ID NO: 10614 - DNA, 20 bp, synthetic construct
  misc_feature 1..20: note = Description of Artificial Sequence: Synthetic oligonucleotide
  misc_feature 1..20: note = Target: ANGPTL4; (+) strand; PAM type: NRG; PAM sequence: TGG
  source 1..20: mol_type = other DNA
tttcacgatgttggccgggc

SEQ ID NO: 10615 - DNA, 20 bp, synthetic construct
  misc_feature 1..20: note = Description of Artificial Sequence: Synthetic oligonucleotide
  misc_feature 1..20: note = Target: ANGPTL4; (+) strand; PAM type: NRG; PAM sequence: TGG
  source 1..20: mol_type = other DNA
cgatgttggccgggctggtc

SEQ ID NO: 10616 - DNA, 20 bp, synthetic construct
  misc_feature 1..20: note = Description of Artificial Sequence: Synthetic oligonucleotide
  misc_feature 1..20: note = Target: ANGPTL4; (+) strand; PAM type: NRG; PAM sequence: AAG
  source 1..20: mol_type = other DNA
tgttggccgggctggtctgg

SEQ ID NO: 10617 - DNA, 20 bp, synthetic construct
  misc_feature 1..20: note = Description of Artificial Sequence: Synthetic oligonucleotide
  misc_feature 1..20: note = Target: ANGPTL4; (+) strand; PAM type: NRG; PAM sequence: AAG
  source 1..20: mol_type = other DNA
ggtctggaagtcttgacctc

SEQ ID NO: 10618 - DNA, 20 bp, synthetic construct
  misc_feature 1..20: note = Description of Artificial Sequence: Synthetic oligonucleotide
  misc_feature 1..20: note = Target: ANGPTL4; (+) strand; PAM type: NRG; PAM sequence: TGG
  source 1..20: mol_type = other DNA
gcgtgcgccctctccgccac

SEQ ID NO: 10619 - DNA, 20 bp, synthetic construct
  misc_feature 1..20: note = Description of Artificial Sequence: Synthetic oligonucleotide
  misc_feature 1..20: note = Target: ANGPTL4; (+) strand; PAM type: NRG; PAM sequence: GGG
  source 1..20: mol_type = other DNA
cgtgcgccctctccgccact

SEQ ID NO: 10620 - DNA, 20 bp, synthetic construct
  misc_feature 1..20: note = Description of Artificial Sequence: Synthetic oligonucleotide
  misc_feature 1..20: note = Target: ANGPTL4; (+) strand; PAM type: NRG; PAM sequence: AAG
  source 1..20: mol_type = other DNA
cgccctctccgccactgggt

SEQ ID NO: 10621 - DNA, 20 bp, synthetic construct
  misc_feature 1..20: note = Description of Artificial Sequence: Synthetic oligonucleotide
  misc_feature 1..20: note = Target: ANGPTL4; (+) strand; PAM type: NRG; PAM sequence: AGG
  source 1..20: mol_type = other DNA
gccctctccgccactgggta

SEQ ID NO: 10622 - DNA, 20 bp, synthetic construct
  misc_feature 1..20: note = Description of Artificial Sequence: Synthetic oligonucleotide
  misc_feature 1..20: note = Target: ANGPTL4; (+) strand; PAM type: NRG; PAM sequence: CGG
  source 1..20: mol_type = other DNA
ctctccgccactgggtaagg

SEQ ID NO: 10623 - DNA, 20 bp, synthetic construct
  misc_feature 1..20: note = Description of Artificial Sequence: Synthetic oligonucleotide
  misc_feature 1..20: note = Target: ANGPTL4; (+) strand; PAM type: NRG; PAM sequence: GGG
  source 1..20: mol_type = other DNA
tctccgccactgggtaaggc

SEQ ID NO: 10624 - DNA, 20 bp, synthetic construct
  misc_feature 1..20: note = Description of Artificial Sequence: Synthetic oligonucleotide
  misc_feature 1..20: note = Target: ANGPTL4; (+) strand; PAM type: NRG; PAM sequence: GGG
  source 1..20: mol_type = other DNA
ctccgccactgggtaaggcg

SEQ ID NO: 10625 - DNA, 20 bp, synthetic construct
  misc_feature 1..20: note = Description of Artificial Sequence: Synthetic oligonucleotide
  misc_feature 1..20: note = Target: ANGPTL4; (+) strand; PAM type: NRG; PAM sequence: GGG
  source 1..20: mol_type = other DNA
tccgccactgggtaaggcgg

SEQ ID NO: 10626 - DNA, 20 bp, synthetic construct
  misc_feature 1..20: note = Description of Artificial Sequence: Synthetic oligonucleotide
  misc_feature 1..20: note = Target: ANGPTL4; (+) strand; PAM type: NRG; PAM sequence: CGG
  source 1..20: mol_type = other DNA
gccactgggtaaggcggggg

SEQ ID NO: 10627 - DNA, 20 bp, synthetic construct
  misc_feature 1..20: note = Description of Artificial Sequence: Synthetic oligonucleotide
  misc_feature 1..20: note = Target: ANGPTL4; (+) strand; PAM type: NRG; PAM sequence: TAG
  source 1..20: mol_type = other DNA
tgggtaaggcgggggcggaa

SEQ ID NO: 10628 - DNA, 20 bp, synthetic construct
  misc_feature 1..20: note = Description of Artificial Sequence: Synthetic oligonucleotide
  misc_feature 1..20: note = Target: ANGPTL4; (+) strand; PAM type: NRG; PAM sequence: AGG
  source 1..20: mol_type = other DNA
gggtaaggcgggggcggaat

SEQ ID NO: 10629 - DNA, 20 bp, synthetic construct
  misc_feature 1..20: note = Description of Artificial Sequence: Synthetic oligonucleotide
  misc_feature 1..20: note = Target: ANGPTL4; (+) strand; PAM type: NRG; PAM sequence: GGG
  source 1..20: mol_type = other DNA
ggtaaggcgggggcggaata

SEQ ID NO: 10630 - DNA, 20 bp, synthetic construct
  misc_feature 1..20: note = Description of Artificial Sequence: Synthetic oligonucleotide
  misc_feature 1..20: note = Target: ANGPTL4; (+) strand; PAM type: NRG; PAM sequence: GGG
  source 1..20: mol_type = other DNA
gtaaggcgggggcggaatag

SEQ ID NO: 10631 - DNA, 20 bp, synthetic construct
  misc_feature 1..20: note = Description of Artificial Sequence: Synthetic oligonucleotide
  misc_feature 1..20: note = Target: ANGPTL4; (+) strand; PAM type: NRG; PAM sequence: GGG
  source 1..20: mol_type = other DNA
taaggcgggggcggaatagg

SEQ ID NO: 10632 - DNA, 20 bp, synthetic construct
  misc_feature 1..20: note = Description of Artificial Sequence: Synthetic oligonucleotide
  misc_feature 1..20: note = Target: ANGPTL4; (+) strand; PAM type: NRG; PAM sequence: TAG
  source 1..20: mol_type = other DNA
gggggcttgcaatttcacac

SEQ ID NO: 10633 - DNA, 20 bp, synthetic construct
  misc_feature 1..20: note = Description of Artificial Sequence: Synthetic oligonucleotide
  misc_feature 1..20: note = Target: ANGPTL4; (+) strand; PAM type: NRG; PAM sequence: GAG
  source 1..20: mol_type = other DNA
gggcttgcaatttcacacta

SEQ ID NO: 10634 - DNA, 20 bp, synthetic construct
  misc_feature 1..20: note = Description of Artificial Sequence: Synthetic oligonucleotide
  misc_feature 1..20: note = Target: ANGPTL4; (+) strand; PAM type: NRG; PAM sequence: AGG
  source 1..20: mol_type = other DNA
ggcttgcaatttcacactag

SEQ ID NO: 10635 - DNA, 20 bp, synthetic construct
  misc_feature 1..20: note = Description of Artificial Sequence: Synthetic oligonucleotide
  misc_feature 1..20: note = Target: ANGPTL4; (+) strand; PAM type: NRG; PAM sequence: CGG
  source 1..20: mol_type = other DNA
ttgcaatttcacactagagg

SEQ ID NO: 10636 - DNA, 20 bp, synthetic construct
  misc_feature 1..20: note = Description of Artificial Sequence: Synthetic oligonucleotide
  misc_feature 1..20: note = Target: ANGPTL4; (+) strand; PAM type: NRG; PAM sequence: GGG
  source 1..20: mol_type = other DNA
tgcaatttcacactagaggc

SEQ ID NO: 10637 - DNA, 20 bp, synthetic construct
  misc_feature 1..20: note = Description of Artificial Sequence: Synthetic oligonucleotide
  misc_feature 1..20: note = Target: ANGPTL4; (+) strand; PAM type: NRG; PAM sequence: TGG
  source 1..20: mol_type = other DNA
cacactagaggcgggcaccg

SEQ ID NO: 10638 - DNA, 20 bp, synthetic construct
  misc_feature 1..20: note = Description of Artificial Sequence: Synthetic oligonucleotide
  misc_feature 1..20: note = Target: ANGPTL4; (+) strand; PAM type: NRG; PAM sequence: GGG
  source 1..20: mol_type = other DNA
acactagaggcgggcaccgt

SEQ ID NO: 10639 - DNA, 20 bp, synthetic construct
  misc_feature 1..20: note = Description of Artificial Sequence: Synthetic oligonucleotide
  misc_feature 1..20: note = Target: ANGPTL4; (+) strand; PAM type: NRG; PAM sequence: GGG
  source 1..20: mol_type = other DNA
cactagaggcgggcaccgtg

SEQ ID NO: 10640 - DNA, 20 bp, synthetic construct
  misc_feature 1..20: note = Description of Artificial Sequence: Synthetic oligonucleotide
  misc_feature 1..20: note = Target: ANGPTL4; (+) strand; PAM type: NRG; PAM sequence: GGG
  source 1..20: mol_type = other DNA
actagaggcgggcaccgtgg

SEQ ID NO: 10641 - DNA, 20 bp, synthetic construct
  misc_feature 1..20: note = Description of Artificial Sequence: Synthetic oligonucleotide
  misc_feature 1..20: note = Target: ANGPTL4; (+) strand; PAM type: NRG; PAM sequence: AAG
  source 1..20: mol_type = other DNA
gaggcgggcaccgtggggga

SEQ ID NO: 10642 - DNA, 20 bp, synthetic construct
  misc_feature 1..20: note = Description of Artificial Sequence: Synthetic oligonucleotide
  misc_feature 1..20: note = Target: ANGPTL4; (+) strand; PAM type: NRG; PAM sequence: AAG
  source 1..20: mol_type = other DNA
gcgggcaccgtgggggaaag

SEQ ID NO: 10643 - DNA, 20 bp, synthetic construct
  misc_feature 1..20: note = Description of Artificial Sequence: Synthetic oligonucleotide
  misc_feature 1..20: note = Target: ANGPTL4; (+) strand; PAM type: NRG; PAM sequence: GAG
  source 1..20: mol_type = other DNA
gggcaccgtgggggaaagaa

SEQ ID NO: 10644 - DNA, 20 bp, synthetic construct
  misc_feature 1..20: note = Description of Artificial Sequence: Synthetic oligonucleotide
  misc_feature 1..20: note = Target: ANGPTL4; (+) strand; PAM type: NRG; PAM sequence: CGG
  source 1..20: mol_type = other DNA
aagaagagtcacgtctccca

SEQ ID NO: 10645 - DNA, 20 bp, synthetic construct
  misc_feature 1..20: note = Description of Artificial Sequence: Synthetic oligonucleotide
  misc_feature 1..20: note = Target: ANGPTL4; (+) strand; PAM type: NRG; PAM sequence: TAG
  source 1..20: mol_type = other DNA
gtcacgtctcccacggttcg

SEQ ID NO: 10646 - DNA, 20 bp, synthetic construct
  misc_feature 1..20: note = Description of Artificial Sequence: Synthetic oligonucleotide
  misc_feature 1..20: note = Target: ANGPTL4; (+) strand; PAM type: NRG; PAM sequence: GAG
  source 1..20: mol_type = other DNA
cacgtctcccacggttcgta

SEQ ID NO: 10647 - DNA, 20 bp, synthetic construct
  misc_feature 1..20: note = Description of Artificial Sequence: Synthetic oligonucleotide
  misc_feature 1..20: note = Target: ANGPTL4; (+) strand; PAM type: NRG; PAM sequence: AGG
  source 1..20: mol_type = other DNA
acgtctcccacggttcgtag

SEQ ID NO: 10648 - DNA, 20 bp, synthetic construct
  misc_feature 1..20: note = Description of Artificial Sequence: Synthetic oligonucleotide
  misc_feature 1..20: note = Target: ANGPTL4; (+) strand; PAM type: NRG; PAM sequence: AAG
  source 1..20: mol_type = other DNA
tctcccacggttcgtagagg

SEQ ID NO: 10649 - DNA, 20 bp, synthetic construct
  misc_feature 1..20: note = Description of Artificial Sequence: Synthetic oligonucleotide
  misc_feature 1..20: note = Target: ANGPTL4; (+) strand; PAM type: NRG; PAM sequence: AGG
  source 1..20: mol_type = other DNA
ctcccacggttcgtagagga

SEQ ID NO: 10650 - DNA, 20 bp, synthetic construct
  misc_feature 1..20: note = Description of Artificial Sequence: Synthetic oligonucleotide
  misc_feature 1..20: note = Target: ANGPTL4; (+) strand; PAM type: NRG; PAM sequence: GAG
  source 1..20: mol_type = other DNA
tcgtagaggaaggcctgcct

SEQ ID NO: 10651 - DNA, 20 bp, synthetic construct
  misc_feature 1..20: note = Description of Artificial Sequence: Synthetic oligonucleotide
  misc_feature 1..20: note = Target: ANGPTL4; (+) strand; PAM type: NRG; PAM sequence: TGG
  source 1..20: mol_type = other DNA
gaggaaggcctgcctgagcc

SEQ ID NO: 10652 - DNA, 20 bp, synthetic construct
  misc_feature 1..20: note = Description of Artificial Sequence: Synthetic oligonucleotide
  misc_feature 1..20: note = Target: ANGPTL4; (+) strand; PAM type: NRG; PAM sequence: GAG
  source 1..20: mol_type = other DNA
ggaaggcctgcctgagcctg

SEQ ID NO: 10653 - DNA, 20 bp, synthetic construct
  misc_feature 1..20: note = Description of Artificial Sequence: Synthetic oligonucleotide
  misc_feature 1..20: note = Target: ANGPTL4; (+) strand; PAM type: NRG; PAM sequence: CGG
  source 1..20: mol_type = other DNA
aggcctgcctgagcctggag

SEQ ID NO: 10654 - DNA, 20 bp, synthetic construct
  misc_feature 1..20: note = Description of Artificial Sequence: Synthetic oligonucleotide
  misc_feature 1..20: note = Target: ANGPTL4; (+) strand; PAM type: NRG; PAM sequence: GGG
  source 1..20: mol_type = other DNA
ggcctgcctgagcctggagc

SEQ ID NO: 10655 - DNA, 20 bp, synthetic construct
  misc_feature 1..20: note = Description of Artificial Sequence: Synthetic oligonucleotide
  misc_feature 1..20: note = Target: ANGPTL4; (+) strand; PAM type: NRG; PAM sequence: GGG
  source 1..20: mol_type = other DNA
gcctgcctgagcctggagcg

SEQ ID NO: 10656 - DNA, 20 bp, synthetic construct
  misc_feature 1..20: note = Description of Artificial Sequence: Synthetic oligonucleotide
  misc_feature 1..20: note = Target: ANGPTL4; (+) strand; PAM type: NRG; PAM sequence: GGG
  source 1..20: mol_type = other DNA
cctgcctgagcctggagcgg

SEQ ID NO: 10657 - DNA, 20 bp, synthetic construct
  misc_feature 1..20: note = Description of Artificial Sequence: Synthetic oligonucleotide
  misc_feature 1..20: note = Target: ANGPTL4; (+) strand; PAM type: NRG; PAM sequence: CGG
  source 1..20: mol_type = other DNA
gcctgagcctggagcggggg

SEQ ID NO: 10658 - DNA, 20 bp, synthetic construct
  misc_feature 1..20: note = Description of Artificial Sequence: Synthetic oligonucleotide
  misc_feature 1..20: note = Target: ANGPTL4; (+) strand; PAM type: NRG; PAM sequence: GGG
  source 1..20: mol_type = other DNA
cctgagcctggagcgggggc

SEQ ID NO: 10659 - DNA, 20 bp, synthetic construct
  misc_feature 1..20: note = Description of Artificial Sequence: Synthetic oligonucleotide
  misc_feature 1..20: note = Target: ANGPTL4; (+) strand; PAM type: NRG; PAM sequence: GAG
  source 1..20: mol_type = other DNA
tgagcctggagcgggggcgg

SEQ ID NO: 10660 - DNA, 20 bp, synthetic construct
  misc_feature 1..20: note = Description of Artificial Sequence: Synthetic oligonucleotide
  misc_feature 1..20: note = Target: ANGPTL4; (+) strand; PAM type: NRG; PAM sequence: GAG
  source 1..20: mol_type = other DNA
agcctggagcgggggcggga

SEQ ID NO: 10661 - DNA, 20 bp, synthetic construct
  misc_feature 1..20: note = Description of Artificial Sequence: Synthetic oligonucleotide
  misc_feature 1..20: note = Target: ANGPTL4; (+) strand; PAM type: NRG; PAM sequence: CAG
  source 1..20: mol_type = other DNA
gagcgggggcgggagagcca

SEQ ID NO: 10662 - DNA, 20 bp, synthetic construct
  misc_feature 1..20: note = Description of Artificial Sequence: Synthetic oligonucleotide
  misc_feature 1..20: note = Target: ANGPTL4; (+) strand; PAM type: NRG; PAM sequence: TGG
  source 1..20: mol_type = other DNA
ggggcgggagagccacagtt

SEQ ID NO: 10663 - DNA, 20 bp, synthetic construct
  misc_feature 1..20: note = Description of Artificial Sequence: Synthetic oligonucleotide
  misc_feature 1..20: note = Target: ANGPTL4; (+) strand; PAM type: NRG; PAM sequence: CAG
  source 1..20: mol_type = other DNA
gagccacagtttggcatccc

SEQ ID NO: 10664 - DNA, 20 bp, synthetic construct
  misc_feature 1..20: note = Description of Artificial Sequence: Synthetic oligonucleotide
  misc_feature 1..20: note = Target: ANGPTL4; (+) strand; PAM type: NRG; PAM sequence: AGG
  source 1..20: mol_type = other DNA
agccacagtttggcatcccc

SEQ ID NO: 10665 - DNA, 20 bp, synthetic construct
  misc_feature 1..20: note = Description of Artificial Sequence: Synthetic oligonucleotide
  misc_feature 1..20: note = Target: ANGPTL4; (+) strand; PAM type: NRG; PAM sequence: GGG
  source 1..20: mol_type = other DNA
gccacagtttggcatcccca

SEQ ID NO: 10666 - DNA, 20 bp, synthetic construct
  misc_feature 1..20: note = Description of Artificial Sequence: Synthetic oligonucleotide
  misc_feature 1..20: note = Target: ANGPTL4; (+) strand; PAM type: NRG; PAM sequence: CAG
  source 1..20: mol_type = other DNA
ggcatccccagggcatcccc

SEQ ID NO: 10667 - DNA, 20 bp, synthetic construct
  misc_feature 1..20: note = Description of Artificial Sequence: Synthetic oligonucleotide
  misc_feature 1..20: note = Target: ANGPTL4; (+) strand; PAM type: NRG; PAM sequence: CAG
  source 1..20: mol_type = other DNA
ccagggcatcccccagcccg

SEQ ID NO: 10668 - DNA, 20 bp, synthetic construct
  misc_feature 1..20: note = Description of Artificial Sequence: Synthetic oligonucleotide
  misc_feature 1..20: note = Target: ANGPTL4; (+) strand; PAM type: NRG; PAM sequence: CAG
  source 1..20: mol_type = other DNA
tcccccagcccgcagactac

SEQ ID NO: 10669 - DNA, 20 bp, synthetic construct
  misc_feature 1..20: note = Description of Artificial Sequence: Synthetic oligonucleotide
  misc_feature 1..20: note = Target: ANGPTL4; (+) strand; PAM type: NRG; PAM sequence: AGG
  source 1..20: mol_type = other DNA
cccccagcccgcagactacc

SEQ ID NO: 10670 - DNA, 20 bp, synthetic construct
  misc_feature 1..20: note = Description of Artificial Sequence: Synthetic oligonucleotide
  misc_feature 1..20: note = Target: ANGPTL4; (+) strand; PAM type: NRG; PAM sequence: CAG
  source 1..20: mol_type = other DNA
cccgcagactaccaggcctc

SEQ ID NO: 10671 - DNA, 20 bp, synthetic construct
  misc_feature 1..20: note = Description of Artificial Sequence: Synthetic oligonucleotide
  misc_feature 1..20: note = Target: ANGPTL4; (+) strand; PAM type: NRG; PAM sequence: GAG
  source 1..20: mol_type = other DNA
cgcagactaccaggcctcca

SEQ ID NO: 10672 - DNA, 20 bp, synthetic construct
  misc_feature 1..20: note = Description of Artificial Sequence: Synthetic oligonucleotide
  misc_feature 1..20: note = Target: ANGPTL4; (+) strand; PAM type: NRG; PAM sequence: AGG
  source 1..20: mol_type = other DNA
gcagactaccaggcctccag

SEQ ID NO: 10673 - DNA, 20 bp, synthetic construct
  misc_feature 1..20: note = Description of Artificial Sequence: Synthetic oligonucleotide
  misc_feature 1..20: note = Target: ANGPTL4; (+) strand; PAM type: NRG; PAM sequence: CAG
  source 1..20: mol_type = other DNA
actaccaggcctccagagga

SEQ ID NO: 10674 - DNA, 20 bp, synthetic construct
  misc_feature 1..20: note = Description of Artificial Sequence: Synthetic oligonucleotide
  misc_feature 1..20: note = Target: ANGPTL4; (+) strand; PAM type: NRG; PAM sequence: AGG
  source 1..20: mol_type = other DNA
ctaccaggcctccagaggac

SEQ ID NO: 10675 - DNA, 20 bp, synthetic construct
  misc_feature 1..20: note = Description of Artificial Sequence: Synthetic oligonucleotide
  misc_feature 1..20: note = Target: ANGPTL4; (+) strand; PAM type: NRG; PAM sequence: CGG
  source 1..20: mol_type = other DNA
agaggacaggaccccacccc

SEQ ID NO: 10676 - DNA, 20 bp, synthetic construct
  misc_feature 1..20: note = Description of Artificial Sequence: Synthetic oligonucleotide
  misc_feature 1..20: note = Target: ANGPTL4; (+) strand; PAM type: NRG; PAM sequence: CAG
  source 1..20: mol_type = other DNA
caggaccccacccccggcca

SEQ ID NO: 10677 - DNA, 20 bp, synthetic construct
  misc_feature 1..20: note = Description of Artificial Sequence: Synthetic oligonucleotide
  misc_feature 1..20: note = Target: ANGPTL4; (+) strand; PAM type: NRG; PAM sequence: AGG
  source 1..20: mol_type = other DNA
aggaccccacccccggccac

SEQ ID NO: 10678 - DNA, 20 bp, synthetic construct
  misc_feature 1..20: note = Description of Artificial Sequence: Synthetic oligonucleotide
  misc_feature 1..20: note = Target: ANGPTL4; (+) strand; PAM type: NRG; PAM sequence: CAG
  source 1..20: mol_type = other DNA
ccggccacaggccctgcccc

SEQ ID NO: 10679 - DNA, 20 bp, synthetic construct
  misc_feature 1..20: note = Description of Artificial Sequence: Synthetic oligonucleotide
  misc_feature 1..20: note = Target: ANGPTL4; (+) strand; PAM type: NRG; PAM sequence: AAG
  source 1..20: mol_type = other DNA
actccccgcaccccgcctcc

SEQ ID NO: 10680 - DNA, 20 bp, synthetic construct
  misc_feature 1..20: note = Description of Artificial Sequence: Synthetic oligonucleotide
  misc_feature 1..20: note = Target: ANGPTL4; (+) strand; PAM type: NRG; PAM sequence: CGG
  source 1..20: mol_type = other DNA
caacttataaaaaccgtcct

SEQ ID NO: 10681 - DNA, 20 bp, synthetic construct
  misc_feature 1..20: note = Description of Artificial Sequence: Synthetic oligonucleotide
  misc_feature 1..20: note = Target: ANGPTL4; (+) strand; PAM type: NRG; PAM sequence: GGG
  source 1..20: mol_type = other DNA
aacttataaaaaccgtcctc

SEQ ID NO: 10682 - DNA, 20 bp, synthetic construct
  misc_feature 1..20: note = Description of Artificial Sequence: Synthetic oligonucleotide
  misc_feature 1..20: note = Target: ANGPTL4; (+) strand; PAM type: NRG; PAM sequence: CGG
  source 1..20: mol_type = other DNA
ataaaaaccgtcctcgggcg

SEQ ID NO: 10683 - DNA, 20 bp, synthetic construct
  misc_feature 1..20: note = Description of Artificial Sequence: Synthetic oligonucleotide
  misc_feature 1..20: note = Target: ANGPTL4; (+) strand; PAM type: NRG; PAM sequence: CGG
  source 1..20: mol_type = other DNA
aaaaccgtcctcgggcgcgg

SEQ ID NO: 10684 - DNA, 20 bp, synthetic construct
  misc_feature 1..20: note = Description of Artificial Sequence: Synthetic oligonucleotide
  misc_feature 1..20: note = Target: ANGPTL4; (+) strand; PAM type: NRG; PAM sequence: GGG
  source 1..20: mol_type = other DNA
aaaccgtcctcgggcgcggc

SEQ ID NO: 10685 - DNA, 20 bp, synthetic construct
  misc_feature 1..20: note = Description of Artificial Sequence: Synthetic oligonucleotide
  misc_feature 1..20: note = Target: ANGPTL4; (+) strand; PAM type: NRG; PAM sequence: GGG
  source 1..20: mol_type = other DNA
aaccgtcctcgggcgcggcg

SEQ ID NO: 10686 - DNA, 20 bp, synthetic construct
  misc_feature 1..20: note = Description of Artificial Sequence: Synthetic oligonucleotide
  misc_feature 1..20: note = Target: ANGPTL4; (+) strand; PAM type: NRG; PAM sequence: GAG
  source 1..20: mol_type = other DNA
ccgtcctcgggcgcggcggg

SEQ ID NO: 10687 - DNA, 20 bp, synthetic construct
  misc_feature 1..20: note = Description of Artificial Sequence: Synthetic oligonucleotide
  misc_feature 1..20: note = Target: ANGPTL4; (+) strand; PAM type: NRG; PAM sequence: AAG
  source 1..20: mol_type = other DNA
tcctcgggcgcggcggggag

SEQ ID NO: 10688 - DNA, 20 bp, synthetic construct
  misc_feature 1..20: note = Description of Artificial Sequence: Synthetic oligonucleotide
  misc_feature 1..20: note = Target: ANGPTL4; (+) strand; PAM type: NRG; PAM sequence: GAG
  source 1..20: mol_type = other DNA
gggcgcggcggggagaagcc

SEQ ID NO: 10689 - DNA, 20 bp, synthetic construct
  misc_feature 1..20: note = Description of Artificial Sequence: Synthetic oligonucleotide
  misc_feature 1..20: note = Target: ANGPTL4; (+) strand; PAM type: NRG; PAM sequence: GAG
  source 1..20: mol_type = other DNA
cggcggggagaagccgagct

SEQ ID NO: 10690 - DNA, 20 bp, synthetic construct
  misc_feature 1..20: note = Description of Artificial Sequence: Synthetic oligonucleotide
  misc_feature 1..20: note = Target: ANGPTL4; (+) strand; PAM type: NRG; PAM sequence: CGG
  source 1..20: mol_type = other DNA
cggggagaagccgagctgag

SEQ ID NO: 10691 - DNA, 20 bp, synthetic construct
  misc_feature 1..20: note = Description of Artificial Sequence: Synthetic oligonucleotide
  misc_feature 1..20: note = Target: ANGPTL4; (+) strand; PAM type: NRG; PAM sequence: CAG
  source 1..20: mol_type = other DNA
gactgtgatccgattctttc

SEQ ID NO: 10692 - DNA, 20 bp, synthetic construct
  misc_feature 1..20: note = Description of Artificial Sequence: Synthetic oligonucleotide
  misc_feature 1..20: note = Target: ANGPTL4; (+) strand; PAM type: NRG; PAM sequence: CGG
  source 1..20: mol_type = other DNA
tgtgatccgattctttccag

SEQ ID NO: 10693 - DNA, 20 bp, synthetic construct
  misc_feature 1..20: note = Description of Artificial Sequence: Synthetic oligonucleotide
  misc_feature 1..20: note = Target: ANGPTL4; (+) strand; PAM type: NRG; PAM sequence: AAG
  source 1..20: mol_type = other DNA
ttccagcggcttctgcaacc

SEQ ID NO: 10694 - DNA, 20 bp, synthetic construct
  misc_feature 1..20: note = Description of Artificial Sequence: Synthetic oligonucleotide
  misc_feature 1..20: note = Target: ANGPTL4; (+) strand; PAM type: NRG; PAM sequence: CGG
  source 1..20: mol_type = other DNA
cagcggcttctgcaaccaag

SEQ ID NO: 10695 - DNA, 20 bp, synthetic construct
  misc_feature 1..20: note = Description of Artificial Sequence: Synthetic oligonucleotide
  misc_feature 1..20: note = Target: ANGPTL4; (+) strand; PAM type: NRG; PAM sequence: GGG
  source 1..20: mol_type = other DNA
agcggcttctgcaaccaagc

SEQ ID NO: 10696 - DNA, 20 bp, synthetic construct
  misc_feature 1..20: note = Description of Artificial Sequence: Synthetic oligonucleotide
  misc_feature 1..20: note = Target: ANGPTL4; (+) strand; PAM type: NRG; PAM sequence: CGG
  source 1..20: mol_type = other DNA
aaccaagcgggtcttacccc

SEQ ID NO: 10697 - DNA, 20 bp, synthetic construct
  misc_feature 1..20: note = Description of Artificial Sequence: Synthetic oligonucleotide
  misc_feature 1..20: note = Target: ANGPTL4; (+) strand; PAM type: NRG; PAM sequence: CAG
  source 1..20: mol_type = other DNA
cccccggtcctccgcgtctc

SEQ ID NO: 10698 - DNA, 20 bp, synthetic construct
  misc_feature 1..20: note = Description of Artificial Sequence: Synthetic oligonucleotide
  misc_feature 1..20: note = Target: ANGPTL4; (+) strand; PAM type: NRG; PAM sequence: TGG
  source 1..20: mol_type = other DNA
gcgtctccagtcctcgcacc

SEQ ID NO: 10699 - DNA, 20 bp, synthetic construct
  misc_feature 1..20: note = Description of Artificial Sequence: Synthetic oligonucleotide
  misc_feature 1..20: note = Target: ANGPTL4; (+) strand; PAM type: NRG; PAM sequence: GAG
  source 1..20: mol_type = other DNA
cctggaaccccaacgtcccc

SEQ ID NO: 10700 - DNA, 20 bp, synthetic construct
  misc_feature 1..20: note = Description of Artificial Sequence: Synthetic oligonucleotide
  misc_feature 1..20: note = Target: ANGPTL4; (+) strand; PAM type: NRG; PAM sequence: GAG
  source 1..20: mol_type = other DNA
tggaaccccaacgtccccga

SEQ ID NO: 10701 - DNA, 20 bp, synthetic construct
  misc_feature 1..20: note = Description of Artificial Sequence: Synthetic oligonucleotide
  misc_feature 1..20: note = Target: ANGPTL4; (+) strand; PAM type: NRG; PAM sequence: CAG
  source 1..20: mol_type = other DNA
agtccccgaatccccgctcc

SEQ ID NO: 10702 - DNA, 20 bp, synthetic construct
  misc_feature 1..20: note = Description of Artificial Sequence: Synthetic oligonucleotide
  misc_feature 1..20: note = Target: ANGPTL4; (+) strand; PAM type: NRG; PAM sequence: AGG
  source 1..20: mol_type = other DNA
gtccccgaatccccgctccc

SEQ ID NO: 10703 - DNA, 20 bp, synthetic construct
  misc_feature 1..20: note = Description of Artificial Sequence: Synthetic oligonucleotide
  misc_feature 1..20: note = Target: ANGPTL4; (+) strand; PAM type: NRG; PAM sequence: AAG
  source 1..20: mol_type = other DNA
tccccgctcccaggctacct

SEQ ID NO: 10704 - DNA, 20 bp, synthetic construct
  misc_feature 1..20: note = Description of Artificial Sequence: Synthetic oligonucleotide
  misc_feature 1..20: note = Target: ANGPTL4; (+) strand; PAM type: NRG; PAM sequence: GAG
  source 1..20: mol_type = other DNA
cccgctcccaggctacctaa

SEQ ID NO: 10705 - DNA, 20 bp, synthetic construct
  misc_feature 1..20: note = Description of Artificial Sequence: Synthetic oligonucleotide
  misc_feature 1..20: note = Target: ANGPTL4; (+) strand; PAM type: NRG; PAM sequence: AGG
  source 1..20: mol_type = other DNA
ccgctcccaggctacctaag

SEQ ID NO: 10706 - DNA, 20 bp, synthetic construct
  misc_feature 1..20: note = Description of Artificial Sequence: Synthetic oligonucleotide
  misc_feature 1..20: note = Target: ANGPTL4; (+) strand; PAM type: NRG; PAM sequence: GAG
  source 1..20: mol_type = other DNA
cccaggctacctaagaggat

SEQ ID NO: 10707 - DNA, 20 bp, synthetic construct
  misc_feature 1..20: note = Description of Artificial Sequence: Synthetic oligonucleotide
  misc_feature 1..20: note = Target: ANGPTL4; (+) strand; PAM type: NRG; PAM sequence: CGG
  source 1..20: mol_type = other DNA
aggctacctaagaggatgag

SEQ ID NO: 10708 - DNA, 20 bp, synthetic construct
  misc_feature 1..20: note = Description of Artificial Sequence: Synthetic oligonucleotide
  misc_feature 1..20: note = Target: ANGPTL4; (+) strand; PAM type: NRG; PAM sequence: CGG
  source 1..20: mol_type = other DNA
gaggatgagcggtgctccga

SEQ ID NO: 10709 - DNA, 20 bp, synthetic construct
  misc_feature 1..20: note = Description of Artificial Sequence: Synthetic oligonucleotide
  misc_feature 1..20: note = Target: ANGPTL4; (+) strand; PAM type: NRG; PAM sequence: CGG
  source 1..20: mol_type = other DNA
atgagcggtgctccgacggc

SEQ ID NO: 10710 - DNA, 20 bp, synthetic construct
  misc_feature 1..20: note = Description of Artificial Sequence: Synthetic oligonucleotide
  misc_feature 1..20: note = Target: ANGPTL4; (+) strand; PAM type: NRG; PAM sequence: GGG
  source 1..20: mol_type = other DNA
tgagcggtgctccgacggcc

SEQ ID NO: 10711 - DNA, 20 bp, synthetic construct
  misc_feature 1..20: note = Description of Artificial Sequence: Synthetic oligonucleotide
  misc_feature 1..20: note = Target: ANGPTL4; (+) strand; PAM type: NRG; PAM sequence: GGG
  source 1..20: mol_type = other DNA
gagcggtgctccgacggccg

SEQ ID NO: 10712 - DNA, 20 bp, synthetic construct
  misc_feature 1..20: note = Description of Artificial Sequence: Synthetic oligonucleotide
  misc_feature 1..20: note = Target: ANGPTL4; (+) strand; PAM type: NRG; PAM sequence: CAG
  source 1..20: mol_type = other DNA
cggtgctccgacggccgggg

SEQ ID NO: 10713 - DNA, 20 bp, synthetic construct
  misc_feature 1..20: note = Description of Artificial Sequence: Synthetic oligonucleotide
  misc_feature 1..20: note = Target: ANGPTL4; (+) strand; PAM type: NRG; PAM sequence: GAG
  source 1..20: mol_type = other DNA
gccgccaccgccgtgctact

SEQ ID NO: 10714 - DNA, 20 bp, synthetic construct
  misc_feature 1..20: note = Description of Artificial Sequence: Synthetic oligonucleotide
  misc_feature 1..20: note = Target: ANGPTL4; (+) strand; PAM type: NRG; PAM sequence: CAG
  source 1..20: mol_type = other DNA
ccgccgtgctactgagcgct

SEQ ID NO: 10715 - DNA, 20 bp, synthetic construct
  misc_feature 1..20: note = Description of Artificial Sequence: Synthetic oligonucleotide
  misc_feature 1..20: note = Target: ANGPTL4; (+) strand; PAM type: NRG; PAM sequence: AGG
  source 1..20: mol_type = other DNA
cgccgtgctactgagcgctc

SEQ ID NO: 10716 - DNA, 20 bp, synthetic construct
  misc_feature 1..20: note = Description of Artificial Sequence: Synthetic oligonucleotide
  misc_feature 1..20: note = Target: ANGPTL4; (+) strand; PAM type: NRG; PAM sequence: GGG
  source 1..20: mol_type = other DNA
gccgtgctactgagcgctca

SEQ ID NO: 10717 - DNA, 20 bp, synthetic construct
  misc_feature 1..20: note = Description of Artificial Sequence: Synthetic oligonucleotide
  misc_feature 1..20: note = Target: ANGPTL4; (+) strand; PAM type: NRG; PAM sequence: CGG
  source 1..20: mol_type = other DNA
gtgctactgagcgctcaggg

SEQ ID NO: 10718 - DNA, 20 bp, synthetic construct
  misc_feature 1..20: note = Description of Artificial Sequence: Synthetic oligonucleotide
  misc_feature 1..20: note = Target: ANGPTL4; (+) strand; PAM type: NRG; PAM sequence: CAG
  source 1..20: mol_type = other DNA
gcgctcagggcggacccgtg

SEQ ID NO: 10719 - DNA, 20 bp, synthetic construct
  misc_feature 1..20: note = Description of Artificial Sequence: Synthetic oligonucleotide
  misc_feature 1..20: note = Target: ANGPTL4; (+) strand; PAM type: NRG; PAM sequence: AAG
  source 1..20: mol_type = other DNA
agggcggacccgtgcagtcc

SEQ ID NO: 10720 - DNA, 20 bp, synthetic construct
  misc_feature 1..20: note = Description of Artificial Sequence: Synthetic oligonucleotide
  misc_feature 1..20: note = Target: ANGPTL4; (+) strand; PAM type: NRG; PAM sequence: TGG
  source 1..20: mol_type = other DNA
agtcgccgcgctttgcgtcc

SEQ ID NO: 10721 - DNA, 20 bp, synthetic construct
  misc_feature 1..20: note = Description of Artificial Sequence: Synthetic oligonucleotide
  misc_feature 1..20: note = Target: ANGPTL4; (+) strand; PAM type: NRG; PAM sequence: GGG
  source 1..20: mol_type = other DNA
gtcgccgcgctttgcgtcct

SEQ ID NO: 10722 - DNA, 20 bp, synthetic construct
  misc_feature 1..20: note = Description of Artificial Sequence: Synthetic oligonucleotide
  misc_feature 1..20: note = Target: ANGPTL4; (+) strand; PAM type: NRG; PAM sequence: GAG
  source 1..20: mol_type = other DNA
cgcgctttgcgtcctgggac

SEQ ID NO: 10723 - DNA, 20 bp, synthetic construct
  misc_feature 1..20: note = Description of Artificial Sequence: Synthetic oligonucleotide
  misc_feature 1..20: note = Target: ANGPTL4; (+) strand; PAM type: NRG; PAM sequence: TGG
  source 1..20: mol_type = other DNA
ctgggacgagatgaatgtcc

SEQ ID NO: 10724 - DNA, 20 bp, synthetic construct
  misc_feature 1..20: note = Description of Artificial Sequence: Synthetic oligonucleotide
  misc_feature 1..20: note = Target: ANGPTL4; (+) strand; PAM type: NRG; PAM sequence: CGG
  source 1..20: mol_type = other DNA
gagatgaatgtcctggcgca

SEQ ID NO: 10725 - DNA, 20 bp, synthetic construct
  misc_feature 1..20: note = Description of Artificial Sequence: Synthetic oligonucleotide
  misc_feature 1..20: note = Target: ANGPTL4; (+) strand; PAM type: NRG; PAM sequence: CAG
  source 1..20: mol_type = other DNA
tcctggcgcacggactcctg

SEQ ID NO: 10726 - DNA, 20 bp, synthetic construct
  misc_feature 1..20: note = Description of Artificial Sequence: Synthetic oligonucleotide
  misc_feature 1..20: note = Target: ANGPTL4; (+) strand; PAM type: NRG; PAM sequence: CGG
  source 1..20: mol_type = other DNA
gcgcacggactcctgcagct

SEQ ID NO: 10727 - DNA, 20 bp, synthetic construct
  misc_feature 1..20: note = Description of Artificial Sequence: Synthetic oligonucleotide
  misc_feature 1..20: note = Target: ANGPTL4; (+) strand; PAM type: NRG; PAM sequence: CAG
  source 1..20: mol_type = other DNA
acggactcctgcagctcggc

SEQ ID NO: 10728 - DNA, 20 bp, synthetic construct
  misc_feature 1..20: note = Description of Artificial Sequence: Synthetic oligonucleotide
  misc_feature 1..20: note = Target: ANGPTL4; (+) strand; PAM type: NRG; PAM sequence: AGG
  source 1..20: mol_type = other DNA
cggactcctgcagctcggcc

SEQ ID NO: 10729 - DNA, 20 bp, synthetic construct
  misc_feature 1..20: note = Description of Artificial Sequence: Synthetic oligonucleotide
  misc_feature 1..20: note = Target: ANGPTL4; (+) strand; PAM type: NRG; PAM sequence: GGG
  source 1..20: mol_type = other DNA
ggactcctgcagctcggcca

SEQ ID NO: 10730 - DNA, 20 bp, synthetic construct
  misc_feature 1..20: note = Description of Artificial Sequence: Synthetic oligonucleotide
  misc_feature 1..20: note = Target: ANGPTL4; (+) strand; PAM type: NRG; PAM sequence: GGG
  source 1..20: mol_type = other DNA
gactcctgcagctcggccag

SEQ ID NO: 10731 - DNA, 20 bp, synthetic construct
  misc_feature 1..20: note = Description of Artificial Sequence: Synthetic oligonucleotide
  misc_feature 1..20: note = Target: ANGPTL4; (+) strand; PAM type: NRG; PAM sequence: CGG
  source 1..20: mol_type = other DNA
ccaggggctgcgcgaacacg

SEQ ID NO: 10732 - DNA, 20 bp, synthetic construct
  misc_feature 1..20: note = Description of Artificial Sequence: Synthetic oligonucleotide
  misc_feature 1..20: note = Target: ANGPTL4; (+) strand; PAM type: NRG; PAM sequence: GAG
  source 1..20: mol_type = other DNA
aggggctgcgcgaacacgcg

SEQ ID NO: 10733 - DNA, 20 bp, synthetic construct
  misc_feature 1..20: note = Description of Artificial Sequence: Synthetic oligonucleotide
  misc_feature 1..20: note = Target: ANGPTL4; (+) strand; PAM type: NRG; PAM sequence: CAG
  source 1..20: mol_type = other DNA
gaacacgcggagcgcacccg

SEQ ID NO: 10734 - DNA, 20 bp, synthetic construct
  misc_feature 1..20: note = Description of Artificial Sequence: Synthetic oligonucleotide
  misc_feature 1..20: note = Target: ANGPTL4; (+) strand; PAM type: NRG; PAM sequence: CAG
  source 1..20: mol_type = other DNA
acgcggagcgcacccgcagt

SEQ ID NO: 10735 - DNA, 20 bp, synthetic construct
  misc_feature 1..20: note = Description of Artificial Sequence: Synthetic oligonucleotide
  misc_feature 1..20: note = Target: ANGPTL4; (+) strand; PAM type: NRG; PAM sequence: GAG
  source 1..20: mol_type = other DNA
gagcgcacccgcagtcagct

SEQ ID NO: 10736 - DNA, 20 bp, synthetic construct
  misc_feature 1..20: note = Description of Artificial Sequence: Synthetic oligonucleotide
  misc_feature 1..20: note = Target: ANGPTL4; (+) strand; PAM type: NRG; PAM sequence: TGG
  source 1..20: mol_type = other DNA
ccgcagtcagctgagcgcgc

SEQ ID NO: 10737 - DNA, 20 bp, synthetic construct
  misc_feature 1..20: note = Description of Artificial Sequence: Synthetic oligonucleotide
  misc_feature 1..20: note = Target: ANGPTL4; (+) strand; PAM type: NRG; PAM sequence: GAG
  source 1..20: mol_type = other DNA
gcagtcagctgagcgcgctg

SEQ ID NO: 10738 - DNA, 20 bp, synthetic construct
  misc_feature 1..20: note = Description of Artificial Sequence: Synthetic oligonucleotide
  misc_feature 1..20: note = Target: ANGPTL4; (+) strand; PAM type: NRG; PAM sequence: CGG
  source 1..20: mol_type = other DNA
gtcagctgagcgcgctggag

SEQ ID NO: 10739 - DNA, 20 bp, synthetic construct
  misc_feature 1..20: note = Description of Artificial Sequence: Synthetic oligonucleotide
  misc_feature 1..20: note = Target: ANGPTL4; (+) strand; PAM type: NRG; PAM sequence: GAG
  source 1..20: mol_type = other DNA
agcgcgctggagcggcgcct

SEQ ID NO: 10740 - DNA, 20 bp, synthetic construct
  misc_feature 1..20: note = Description of Artificial Sequence: Synthetic oligonucleotide
  misc_feature 1..20: note = Target: ANGPTL4; (+) strand; PAM type: NRG; PAM sequence: CGG
  source 1..20: mol_type = other DNA
gagcggcgcctgagcgcgtg

SEQ ID NO: 10741 - DNA, 20 bp, synthetic construct
  misc_feature 1..20: note = Description of Artificial Sequence: Synthetic oligonucleotide
  misc_feature 1..20: note = Target: ANGPTL4; (+) strand; PAM type: NRG; PAM sequence: GGG
  source 1..20: mol_type = other DNA
agcggcgcctgagcgcgtgc

SEQ ID NO: 10742 - DNA, 20 bp, synthetic construct
  misc_feature 1..20: note = Description of Artificial Sequence: Synthetic oligonucleotide
  misc_feature 1..20: note = Target: ANGPTL4; (+) strand; PAM type: NRG; PAM sequence: CAG
  source 1..20: mol_type = other DNA
gcgcgtgcgggtccgcctgt

SEQ ID NO: 10743 - DNA, 20 bp, synthetic construct
  misc_feature 1..20: note = Description of Artificial Sequence: Synthetic oligonucleotide
  misc_feature 1..20: note = Target: ANGPTL4; (+) strand; PAM type: NRG; PAM sequence: AGG
  source 1..20: mol_type = other DNA
cgcgtgcgggtccgcctgtc

SEQ ID NO: 10744 - DNA, 20 bp, synthetic construct
  misc_feature 1..20: note = Description of Artificial Sequence: Synthetic oligonucleotide
  misc_feature 1..20: note = Target: ANGPTL4; (+) strand; PAM type: NRG; PAM sequence: GGG
  source 1..20: mol_type = other DNA
gcgtgcgggtccgcctgtca

SEQ ID NO: 10745 - DNA, 20 bp, synthetic construct
  misc_feature 1..20: note = Description of Artificial Sequence: Synthetic oligonucleotide
  misc_feature 1..20: note = Target: ANGPTL4; (+) strand; PAM type: NRG; PAM sequence: GAG
  source 1..20: mol_type = other DNA
ggtccgcctgtcagggaacc

SEQ ID NO: 10746 - DNA, 20 bp, synthetic construct
  misc_feature 1..20: note = Description of Artificial Sequence: Synthetic oligonucleotide
  misc_feature 1..20: note = Target: ANGPTL4; (+) strand; PAM type: NRG; PAM sequence: AGG
  source 1..20: mol_type = other DNA
gtccgcctgtcagggaaccg

SEQ ID NO: 10747 - DNA, 20 bp, synthetic construct
  misc_feature 1..20: note = Description of Artificial Sequence: Synthetic oligonucleotide
  misc_feature 1..20: note = Target: ANGPTL4; (+) strand; PAM type: NRG; PAM sequence: GGG
  source 1..20: mol_type = other DNA
tccgcctgtcagggaaccga

SEQ ID NO: 10748 - DNA, 20 bp, synthetic construct
  misc_feature 1..20: note = Description of Artificial Sequence: Synthetic oligonucleotide
  misc_feature 1..20: note = Target: ANGPTL4; (+) strand; PAM type: NRG; PAM sequence: GGG
  source 1..20: mol_type = other DNA
ccgcctgtcagggaaccgag

SEQ ID NO: 10749 - DNA, 20 bp, synthetic construct
  misc_feature 1..20: note = Description of Artificial Sequence: Synthetic oligonucleotide
  misc_feature 1..20: note = Target: ANGPTL4; (+) strand; PAM type: NRG; PAM sequence: TAG
  source 1..20: mol_type = other DNA
ggggtccaccgacctcccgt

SEQ ID NO: 10750 - DNA, 20 bp, synthetic construct
  misc_feature 1..20: note = Description of Artificial Sequence: Synthetic oligonucleotide
  misc_feature 1..20: note = Target: ANGPTL4; (+) strand; PAM type: NRG; PAM sequence: GAG
  source 1..20: mol_type = other DNA
ccgacctcccgttagcccct

SEQ ID NO: 10751 - DNA, 20 bp, synthetic construct
  misc_feature 1..20: note = Description of Artificial Sequence: Synthetic oligonucleotide
  misc_feature 1..20: note = Target: ANGPTL4; (+) strand; PAM type: NRG; PAM sequence: GAG
  source 1..20: mol_type = other DNA
gacctcccgttagcccctga

SEQ ID NO: 10752 - DNA, 20 bp, synthetic construct
  misc_feature 1..20: note = Description of Artificial Sequence: Synthetic oligonucleotide
  misc_feature 1..20: note = Target: ANGPTL4; (+) strand; PAM type: NRG; PAM sequence: CGG
  source 1..20: mol_type = other DNA
tcccgttagcccctgagagc

SEQ ID NO: 10753 - DNA, 20 bp, synthetic construct
  misc_feature 1..20: note = Description of Artificial Sequence: Synthetic oligonucleotide
  misc_feature 1..20: note = Target: ANGPTL4; (+) strand; PAM type: NRG; PAM sequence: GGG
  source 1..20: mol_type = other DNA
cccgttagcccctgagagcc

SEQ ID NO: 10754 - DNA, 20 bp, synthetic construct
  misc_feature 1..20: note = Description of Artificial Sequence: Synthetic oligonucleotide
  misc_feature 1..20: note = Target: ANGPTL4; (+) strand; PAM type: NRG; PAM sequence: TGG
  source 1..20: mol_type = other DNA
gttagcccctgagagccggg

SEQ ID NO: 10755 - DNA, 20 bp, synthetic construct
  misc_feature 1..20: note = Description of Artificial Sequence: Synthetic oligonucleotide
  misc_feature 1..20: note = Target: ANGPTL4; (+) strand; PAM type: NRG; PAM sequence: GAG
  source 1..20: mol_type = other DNA
ctgagagccgggtggaccct

SEQ ID NO: 10756 - DNA, 20 bp, synthetic construct
  misc_feature 1..20: note = Description of Artificial Sequence: Synthetic oligonucleotide
  misc_feature 1..20: note = Target: ANGPTL4; (+) strand; PAM type: NRG; PAM sequence: AGG
  source 1..20: mol_type = other DNA
tgagagccgggtggaccctg

SEQ ID NO: 10757 - DNA, 20 bp, synthetic construct
  misc_feature 1..20: note = Description of Artificial Sequence: Synthetic oligonucleotide
  misc_feature 1..20: note = Target: ANGPTL4; (+) strand; PAM type: NRG; PAM sequence: CAG
  source 1..20: mol_type = other DNA
gtggaccctgaggtccttca

SEQ ID NO: 10758 - DNA, 20 bp, synthetic construct
  misc_feature 1..20: note = Description of Artificial Sequence: Synthetic oligonucleotide
  misc_feature 1..20: note = Target: ANGPTL4; (+) strand; PAM type: NRG; PAM sequence: CAG
  source 1..20: mol_type = other DNA
ctgaggtccttcacagcctg

SEQ ID NO: 10759 - DNA, 20 bp, synthetic construct
  misc_feature 1..20: note = Description of Artificial Sequence: Synthetic oligonucleotide
  misc_feature 1..20: note = Target: ANGPTL4; (+) strand; PAM type: NRG; PAM sequence: AGG
  source 1..20: mol_type = other DNA
tgaggtccttcacagcctgc

SEQ ID NO: 10760 - DNA, 20 bp, synthetic construct
  misc_feature 1..20: note = Description of Artificial Sequence: Synthetic oligonucleotide
  misc_feature 1..20: note = Target: ANGPTL4; (+) strand; PAM type: NRG; PAM sequence: CAG
  source 1..20: mol_type = other DNA
agcctgcaggtacgtgtccc

SEQ ID NO: 10761 - DNA, 20 bp, synthetic construct
  misc_feature 1..20: note = Description of Artificial Sequence: Synthetic oligonucleotide
  misc_feature 1..20: note = Target: ANGPTL4; (+) strand; PAM type: NRG; PAM sequence: AGG
  source 1..20: mol_type = other DNA
gcctgcaggtacgtgtcccc

SEQ ID NO: 10762 - DNA, 20 bp, synthetic construct
  misc_feature 1..20: note = Description of Artificial Sequence: Synthetic oligonucleotide
  misc_feature 1..20: note = Target: ANGPTL4; (+) strand; PAM type: NRG; PAM sequence: GGG
  source 1..20: mol_type = other DNA
cctgcaggtacgtgtcccca

SEQ ID NO: 10763 - DNA, 20 bp, synthetic construct
  misc_feature 1..20: note = Description of Artificial Sequence: Synthetic oligonucleotide
  misc_feature 1..20: note = Target: ANGPTL4; (+) strand; PAM type: NRG; PAM sequence: TGG
  source 1..20: mol_type = other DNA
caggtacgtgtccccagggc

SEQ ID NO: 10764 - DNA, 20 bp, synthetic construct
  misc_feature 1..20: note = Description of Artificial Sequence: Synthetic oligonucleotide
  misc_feature 1..20: note = Target: ANGPTL4; (+) strand; PAM type: NRG; PAM sequence: TAG
  source 1..20: mol_type = other DNA
gggctggttctccgcgcccc

SEQ ID NO: 10765 - DNA, 20 bp, synthetic construct
  misc_feature 1..20: note = Description of Artificial Sequence: Synthetic oligonucleotide
  misc_feature 1..20: note = Target: ANGPTL4; (+) strand; PAM type: NRG; PAM sequence: TGG
  source 1..20: mol_type = other DNA
ctggttctccgcgcccctag

SEQ ID NO: 10766 - DNA, 20 bp, synthetic construct
  misc_feature 1..20: note = Description of Artificial Sequence: Synthetic oligonucleotide
  misc_feature 1..20: note = Target: ANGPTL4; (+) strand; PAM type: NRG; PAM sequence: TGG
  source 1..20: mol_type = other DNA
cgcgcccctagtggctctcc

SEQ ID NO: 10767 - DNA, 20 bp, synthetic construct
  misc_feature 1..20: note = Description of Artificial Sequence: Synthetic oligonucleotide
  misc_feature 1..20: note = Target: ANGPTL4; (+) strand; PAM type: NRG; PAM sequence: TGG
  source 1..20: mol_type = other DNA
ccctagtggctctcctggct

SEQ ID NO: 10768 - DNA, 20 bp, synthetic construct
  misc_feature 1..20: note = Description of Artificial Sequence: Synthetic oligonucleotide
  misc_feature 1..20: note = Target: ANGPTL4; (+) strand; PAM type: NRG; PAM sequence: AAG
  source 1..20: mol_type = other DNA
tagtggctctcctggcttgg

SEQ ID NO: 10769 - DNA, 20 bp, synthetic construct
  misc_feature 1..20: note = Description of Artificial Sequence: Synthetic oligonucleotide
  misc_feature 1..20: note = Target: ANGPTL4; (+) strand; PAM type: NRG; PAM sequence: AGG
  source 1..20: mol_type = other DNA
agtggctctcctggcttgga

SEQ ID NO: 10770 - DNA, 20 bp, synthetic construct
  misc_feature 1..20: note = Description of Artificial Sequence: Synthetic oligonucleotide
  misc_feature 1..20: note = Target: ANGPTL4; (+) strand; PAM type: NRG; PAM sequence: GGG
  source 1..20: mol_type = other DNA
gtggctctcctggcttggaa

SEQ ID NO: 10771 - DNA, 20 bp, synthetic construct
  misc_feature 1..20: note = Description of Artificial Sequence: Synthetic oligonucleotide
  misc_feature 1..20: note = Target: ANGPTL4; (+) strand; PAM type: NRG; PAM sequence: TGG
  source 1..20: mol_type = other DNA
tctcctggcttggaagggta

SEQ ID NO: 10772 - DNA, 20 bp, synthetic construct
  misc_feature 1..20: note = Description of Artificial Sequence: Synthetic oligonucleotide
  misc_feature 1..20: note = Target: ANGPTL4; (+) strand; PAM type: NRG; PAM sequence: CAG
  source 1..20: mol_type = other DNA
ctggcttggaagggtatgga

SEQ ID NO: 10773 - DNA, 20 bp, synthetic construct
  misc_feature 1..20: note = Description of Artificial Sequence: Synthetic oligonucleotide
  misc_feature 1..20: note = Target: ANGPTL4; (+) strand; PAM type: NRG; PAM sequence: AGG
  source 1..20: mol_type = other DNA
tggcttggaagggtatggac

SEQ ID NO: 10774 - DNA, 20 bp, synthetic construct
  misc_feature 1..20: note = Description of Artificial Sequence: Synthetic oligonucleotide
  misc_feature 1..20: note = Target: ANGPTL4; (+) strand; PAM type: NRG; PAM sequence: GAG
  source 1..20: mol_type = other DNA
gcttggaagggtatggacag

SEQ ID NO: 10775 - DNA, 20 bp, synthetic construct
  misc_feature 1..20: note = Description of Artificial Sequence: Synthetic oligonucleotide
  misc_feature 1..20: note = Target: ANGPTL4; (+) strand; PAM type: NRG; PAM sequence: TGG
  source 1..20: mol_type = other DNA
tggaagggtatggacaggag

SEQ ID NO: 10776 - DNA, 20 bp, synthetic construct
  misc_feature 1..20: note = Description of Artificial Sequence: Synthetic oligonucleotide
  misc_feature 1..20: note = Target: ANGPTL4; (+) strand; PAM type: NRG; PAM sequence: GGG
  source 1..20: mol_type = other DNA
ggaagggtatggacaggagt

SEQ ID NO: 10777 - DNA, 20 bp, synthetic construct
  misc_feature 1..20: note = Description of Artificial Sequence: Synthetic oligonucleotide
  misc_feature 1..20: note = Target: ANGPTL4; (+) strand; PAM type: NRG; PAM sequence: GGG
  source 1..20: mol_type = other DNA
gaagggtatggacaggagtg

SEQ ID NO: 10778 - DNA, 20 bp, synthetic construct
  misc_feature 1..20: note = Description of Artificial Sequence: Synthetic oligonucleotide
  misc_feature 1..20: note = Target: ANGPTL4; (+) strand; PAM type: NRG; PAM sequence: TGG
  source 1..20: mol_type = other DNA
gtatggacaggagtggggcg

SEQ ID NO: 10779 - DNA, 20 bp, synthetic construct
  misc_feature 1..20: note = Description of Artificial Sequence: Synthetic oligonucleotide
  misc_feature 1..20: note = Target: ANGPTL4; (+) strand; PAM type: NRG; PAM sequence: GGG
  source 1..20: mol_type = other DNA
tatggacaggagtggggcgt

SEQ ID NO: 10780 - DNA, 20 bp, synthetic construct
  misc_feature 1..20: note = Description of Artificial Sequence: Synthetic oligonucleotide
  misc_feature 1..20: note = Target: ANGPTL4; (+) strand; PAM type: NRG; PAM sequence: GGG
  source 1..20: mol_type = other DNA
atggacaggagtggggcgtg

SEQ ID NO: 10781 - DNA, 20 bp, synthetic construct
  misc_feature 1..20: note = Description of Artificial Sequence: Synthetic oligonucleotide
  misc_feature 1..20: note = Target: ANGPTL4; (+) strand; PAM type: NRG; PAM sequence: GGG
  source 1..20: mol_type = other DNA
tggacaggagtggggcgtgg

SEQ ID NO: 10782 - DNA, 20 bp, synthetic construct
  misc_feature 1..20: note = Description of Artificial Sequence: Synthetic oligonucleotide
  misc_feature 1..20: note = Target: ANGPTL4; (+) strand; PAM type: NRG; PAM sequence: CGG
  source 1..20: mol_type = other DNA
acaggagtggggcgtggggg

SEQ ID NO: 10783 - DNA, 20 bp, synthetic construct
  misc_feature 1..20: note = Description of Artificial Sequence: Synthetic oligonucleotide
  misc_feature 1..20: note = Target: ANGPTL4; (+) strand; PAM type: NRG; PAM sequence: GGG
  source 1..20: mol_type = other DNA
caggagtggggcgtgggggc

SEQ ID NO: 10784 - DNA, 20 bp, synthetic construct
  misc_feature 1..20: note = Description of Artificial Sequence: Synthetic oligonucleotide
  misc_feature 1..20: note = Target: ANGPTL4; (+) strand; PAM type: NRG; PAM sequence: GGG
  source 1..20: mol_type = other DNA
aggagtggggcgtgggggcg

SEQ ID NO: 10785 - DNA, 20 bp, synthetic construct
  misc_feature 1..20: note = Description of Artificial Sequence: Synthetic oligonucleotide
  misc_feature 1..20: note = Target: ANGPTL4; (+) strand; PAM type: NRG; PAM sequence: TGG
  source 1..20: mol_type = other DNA
gggggcggggtgcgcaactg

SEQ ID NO: 10786 - DNA, 20 bp, synthetic construct
  misc_feature 1..20: note = Description of Artificial Sequence: Synthetic oligonucleotide
  misc_feature 1..20: note = Target: ANGPTL4; (+) strand; PAM type: NRG; PAM sequence: TGG
  source 1..20: mol_type = other DNA
ggtgcgcaactgtggctccc

SEQ ID NO: 10787 - DNA, 20 bp, synthetic construct
  misc_feature 1..20: note = Description of Artificial Sequence: Synthetic oligonucleotide
  misc_feature 1..20: note = Target: ANGPTL4; (+) strand; PAM type: NRG; PAM sequence: GGG
  source 1..20: mol_type = other DNA
gtgcgcaactgtggctccct

SEQ ID NO: 10788 - DNA, 20 bp, synthetic construct
  misc_feature 1..20: note = Description of Artificial Sequence: Synthetic oligonucleotide
  misc_feature 1..20: note = Target: ANGPTL4; (+) strand; PAM type: NRG; PAM sequence: AAG
  source 1..20: mol_type = other DNA
tccctgggcttccctgcgtc

SEQ ID NO: 10789 - DNA, 20 bp, synthetic construct
  misc_feature 1..20: note = Description of Artificial Sequence: Synthetic oligonucleotide
  misc_feature 1..20: note = Target: ANGPTL4; (+) strand; PAM type: NRG; PAM sequence: AGG
  source 1..20: mol_type = other DNA
ccctgggcttccctgcgtca

SEQ ID NO: 10790 - DNA, 20 bp, synthetic construct
  misc_feature 1..20: note = Description of Artificial Sequence: Synthetic oligonucleotide
  misc_feature 1..20: note = Target: ANGPTL4; (+) strand; PAM type: NRG; PAM sequence: GGG
  source 1..20: mol_type = other DNA
cctgggcttccctgcgtcaa

SEQ ID NO: 10791 - DNA, 20 bp, synthetic construct
  misc_feature 1..20: note = Description of Artificial Sequence: Synthetic oligonucleotide
  misc_feature 1..20: note = Target: ANGPTL4; (+) strand; PAM type: NRG; PAM sequence: TGG
  source 1..20: mol_type = other DNA
ggcttccctgcgtcaaggga

SEQ ID NO: 10792 - DNA, 20 bp, synthetic construct
  misc_feature 1..20: note = Description of Artificial Sequence: Synthetic oligonucleotide
  misc_feature 1..20: note = Target: ANGPTL4; (+) strand; PAM type: NRG; PAM sequence: GGG
  source 1..20: mol_type = other DNA
gcttccctgcgtcaagggat

SEQ ID NO: 10793 - DNA, 20 bp, synthetic construct
  misc_feature 1..20: note = Description of Artificial Sequence: Synthetic oligonucleotide
  misc_feature 1..20: note = Target: ANGPTL4; (+) strand; PAM type: NRG; PAM sequence: TAG
  source 1..20: mol_type = other DNA
caagggatgggctcccccct

SEQ ID NO: 10794 - DNA, 20 bp, synthetic construct
  misc_feature 1..20: note = Description of Artificial Sequence: Synthetic oligonucleotide
  misc_feature 1..20: note = Target: ANGPTL4; (+) strand; PAM type: NRG; PAM sequence: AGG
  source 1..20: mol_type = other DNA
aagggatgggctcccccctt

SEQ ID NO: 10795 - DNA, 20 bp, synthetic construct
  misc_feature 1..20: note = Description of Artificial Sequence: Synthetic oligonucleotide
  misc_feature 1..20: note = Target: ANGPTL4; (+) strand; PAM type: NRG; PAM sequence: AAG
  source 1..20: mol_type = other DNA
ggatgggctccccccttagg

SEQ ID NO: 10796 - DNA, 20 bp, synthetic construct
  misc_feature 1..20: note = Description of Artificial Sequence: Synthetic oligonucleotide
  misc_feature 1..20: note = Target: ANGPTL4; (+) strand; PAM type: NRG; PAM sequence: GAG
  source 1..20: mol_type = other DNA
ggctccccccttaggaagcc

SEQ ID NO: 10797 - DNA, 20 bp, synthetic construct
  misc_feature 1..20: note = Description of Artificial Sequence: Synthetic oligonucleotide
  misc_feature 1..20: note = Target: ANGPTL4; (+) strand; PAM type: NRG; PAM sequence: AGG
  source 1..20: mol_type = other DNA
gctccccccttaggaagccg

SEQ ID NO: 10798 - DNA, 20 bp, synthetic construct
  misc_feature 1..20: note = Description of Artificial Sequence: Synthetic oligonucleotide
  misc_feature 1..20: note = Target: ANGPTL4; (+) strand; PAM type: NRG; PAM sequence: GAG
  source 1..20: mol_type = other DNA
tccccccttaggaagccgag

SEQ ID NO: 10799 - DNA, 20 bp, synthetic construct
  misc_feature 1..20: note = Description of Artificial Sequence: Synthetic oligonucleotide
  misc_feature 1..20: note = Target: ANGPTL4; (+) strand; PAM type: NRG; PAM sequence: AGG
  source 1..20: mol_type = other DNA
ccccccttaggaagccgagg

SEQ ID NO: 10800 - DNA, 20 bp, synthetic construct
  misc_feature 1..20: note = Description of Artificial Sequence: Synthetic oligonucleotide
  misc_feature 1..20: note = Target: ANGPTL4; (+) strand; PAM type: NRG; PAM sequence: GGG
  source 1..20: mol_type = other DNA
cccccttaggaagccgagga

SEQ ID NO: 10801 - DNA, 20 bp, synthetic construct
  misc_feature 1..20: note = Description of Artificial Sequence: Synthetic oligonucleotide
  misc_feature 1..20: note = Target: ANGPTL4; (+) strand; PAM type: NRG; PAM sequence: GAG
  source 1..20: mol_type = other DNA
cccttaggaagccgaggagg

SEQ ID NO: 10802 - DNA, 20 bp, synthetic construct
  misc_feature 1..20: note = Description of Artificial Sequence: Synthetic oligonucleotide
  misc_feature 1..20: note = Target: ANGPTL4; (+) strand; PAM type: NRG; PAM sequence: AGG
  source 1..20: mol_type = other DNA
ccttaggaagccgaggaggg

SEQ ID NO: 10803 - DNA, 20 bp, synthetic construct
  misc_feature 1..20: note = Description of Artificial Sequence: Synthetic oligonucleotide
  misc_feature 1..20: note = Target: ANGPTL4; (+) strand; PAM type: NRG; PAM sequence: AAG
  source 1..20: mol_type = other DNA
ccgaggagggaggttcgctc

SEQ ID NO: 10804 - DNA, 20 bp, synthetic construct
  misc_feature 1..20: note = Description of Artificial Sequence: Synthetic oligonucleotide
  misc_feature 1..20: note = Target: ANGPTL4; (+) strand; PAM type: NRG; PAM sequence: AGG
  source 1..20: mol_type = other DNA
cgaggagggaggttcgctca

SEQ ID NO: 10805 - DNA, 20 bp, synthetic construct
  misc_feature 1..20: note = Description of Artificial Sequence: Synthetic oligonucleotide
  misc_feature 1..20: note = Target: ANGPTL4; (+) strand; PAM type: NRG; PAM sequence: CAG
  source 1..20: mol_type = other DNA
gagggaggttcgctcaaggc

SEQ ID NO: 10806 - DNA, 20 bp, synthetic construct
  misc_feature 1..20: note = Description of Artificial Sequence: Synthetic oligonucleotide
  misc_feature 1..20: note = Target: ANGPTL4; (+) strand; PAM type: NRG; PAM sequence: AGG
  source 1..20: mol_type = other DNA
agggaggttcgctcaaggcc

SEQ ID NO: 10807 - DNA, 20 bp, synthetic construct
  misc_feature 1..20: note = Description of Artificial Sequence: Synthetic oligonucleotide
  misc_feature 1..20: note = Target: ANGPTL4; (+) strand; PAM type: NRG; PAM sequence: AAG
  source 1..20: mol_type = other DNA
tcgctcaaggccaggaattc

SEQ ID NO: 10808 - DNA, 20 bp, synthetic construct
  misc_feature 1..20: note = Description of Artificial Sequence: Synthetic oligonucleotide
  misc_feature 1..20: note = Target: ANGPTL4; (+) strand; PAM type: NRG; PAM sequence: AAG
  source 1..20: mol_type = other DNA
caggaattcaagaccaccta

SEQ ID NO: 10809 - DNA, 20 bp, synthetic construct
  misc_feature 1..20: note = Description of Artificial Sequence: Synthetic oligonucleotide
  misc_feature 1..20: note = Target: ANGPTL4; (+) strand; PAM type: NRG; PAM sequence: TAG
  source 1..20: mol_type = other DNA
caagaccacctaaagcaaaa

SEQ ID NO: 10810 - DNA, 20 bp, synthetic construct
  misc_feature 1..20: note = Description of Artificial Sequence: Synthetic oligonucleotide
  misc_feature 1..20: note = Target: ANGPTL4; (+) strand; PAM type: NRG; PAM sequence: GAG
  source 1..20: mol_type = other DNA
accacctaaagcaaaatagc

SEQ ID NO: 10811 - DNA, 20 bp, synthetic construct
  misc_feature 1..20: note = Description of Artificial Sequence: Synthetic oligonucleotide
  misc_feature 1..20: note = Target: ANGPTL4; (+) strand; PAM type: NRG; PAM sequence: CGG
  source 1..20: mol_type = other DNA
atataaaattaaaaaacgac

SEQ ID NO: 10812 - DNA, 20 bp, synthetic construct
  misc_feature 1..20: note = Description of Artificial Sequence: Synthetic oligonucleotide
  misc_feature 1..20: note = Target: ANGPTL4; (+) strand; PAM type: NRG; PAM sequence: GGG
  source 1..20: mol_type = other DNA
tataaaattaaaaaacgacc

SEQ ID NO: 10813 - DNA, 20 bp, synthetic construct
  misc_feature 1..20: note = Description of Artificial Sequence: Synthetic oligonucleotide
  misc_feature 1..20: note = Target: ANGPTL4; (+) strand; PAM type: NRG; PAM sequence: CAG
  source 1..20: mol_type = other DNA
aattaaaaaacgaccgggcg

SEQ ID NO: 10814 - DNA, 20 bp, synthetic construct
  misc_feature 1..20: note = Description of Artificial Sequence: Synthetic oligonucleotide
  misc_feature 1..20: note = Target: ANGPTL4; (+) strand; PAM type: NRG; PAM sequence: TGG
  source 1..20: mol_type = other DNA
taaaaaacgaccgggcgcag

SEQ ID NO: 10815 - DNA, 20 bp, synthetic construct
  misc_feature 1..20: note = Description of Artificial Sequence: Synthetic oligonucleotide
  misc_feature 1..20: note = Target: ANGPTL4; (+) strand; PAM type: NRG; PAM sequence: CGG
  source 1..20: mol_type = other DNA
cgaccgggcgcagtggctca

SEQ ID NO: 10816 - DNA, 20 bp, synthetic construct
  misc_feature 1..20: note = Description of Artificial Sequence: Synthetic oligonucleotide
  misc_feature 1..20: note = Target: ANGPTL4; (+) strand; PAM type: NRG; PAM sequence: GAG
  source 1..20: mol_type = other DNA
accgggcgcagtggctcacg

SEQ ID NO: 10817 - DNA, 20 bp, synthetic construct
  misc_feature 1..20: note = Description of Artificial Sequence: Synthetic oligonucleotide
  misc_feature 1..20: note = Target: ANGPTL4; (+) strand; PAM type: NRG; PAM sequence: GAG
  source 1..20: mol_type = other DNA
cggagcctccacctgctgtc

SEQ ID NO: 10818 - DNA, 20 bp, synthetic construct
  misc_feature 1..20: note = Description of Artificial Sequence: Synthetic oligonucleotide
  misc_feature 1..20: note = Target: ANGPTL4; (+) strand; PAM type: NRG; PAM sequence: TAG
  source 1..20: mol_type = other DNA
cctccacctgctgtcgagac

SEQ ID NO: 10819 - DNA, 20 bp, synthetic construct
  misc_feature 1..20: note = Description of Artificial Sequence: Synthetic oligonucleotide
  misc_feature 1..20: note = Target: ANGPTL4; (+) strand; PAM type: NRG; PAM sequence: TGG
  source 1..20: mol_type = other DNA
acctgctgtcgagactagcc

SEQ ID NO: 10820 - DNA, 20 bp, synthetic construct
  misc_feature 1..20: note = Description of Artificial Sequence: Synthetic oligonucleotide
  misc_feature 1..20: note = Target: ANGPTL4; (+) strand; PAM type: NRG; PAM sequence: TGG
  source 1..20: mol_type = other DNA
cgagactagcctggccaaca

SEQ ID NO: 10821 - DNA, 20 bp, synthetic construct
  misc_feature 1..20: note = Description of Artificial Sequence: Synthetic oligonucleotide
  misc_feature 1..20: note = Target: ANGPTL4; (+) strand; PAM type: NRG; PAM sequence: GAG
  source 1..20: mol_type = other DNA
agactagcctggccaacatg

SEQ ID NO: 10822 - DNA, 20 bp, synthetic construct
  misc_feature 1..20: note = Description of Artificial Sequence: Synthetic oligonucleotide
  misc_feature 1..20: note = Target: ANGPTL4; (+) strand; PAM type: NRG; PAM sequence: TAG
  source 1..20: mol_type = other DNA
ctactaaaaatacaaaaaat

SEQ ID NO: 10823 - DNA, 20 bp, synthetic construct
  misc_feature 1..20: note = Description of Artificial Sequence: Synthetic oligonucleotide
  misc_feature 1..20: note = Target: ANGPTL4; (+) strand; PAM type: NRG; PAM sequence: TGG
  source 1..20: mol_type = other DNA
aaaaatacaaaaaattagcc

SEQ ID NO: 10824 - DNA, 20 bp, synthetic construct
  misc_feature 1..20: note = Description of Artificial Sequence: Synthetic oligonucleotide
  misc_feature 1..20: note = Target: ANGPTL4; (+) strand; PAM type: NRG; PAM sequence: TGG
  source 1..20: mol_type = other DNA
tacaaaaaattagcctggca

SEQ ID NO: 10825 - DNA, 20 bp, synthetic construct
  misc_feature 1..20: note = Description of Artificial Sequence: Synthetic oligonucleotide
  misc_feature 1..20: note = Target: ANGPTL4; (+) strand; PAM type: NRG; PAM sequence: CAG
  source 1..20: mol_type = other DNA
ggtgtgcatgcctgtaatcc

SEQ ID NO: 10826 - DNA, 20 bp, synthetic construct
  misc_feature 1..20: note = Description of Artificial Sequence: Synthetic oligonucleotide
  misc_feature 1..20: note = Target: ANGPTL4; (+) strand; PAM type: NRG; PAM sequence: TGG
  source 1..20: mol_type = other DNA
tgcctgtaatcccagctact

SEQ ID NO: 10827 - DNA, 20 bp, synthetic construct
  misc_feature 1..20: note = Description of Artificial Sequence: Synthetic oligonucleotide
  misc_feature 1..20: note = Target: ANGPTL4; (+) strand; PAM type: NRG; PAM sequence: GGG
  source 1..20: mol_type = other DNA
gcctgtaatcccagctactt

SEQ ID NO: 10828 - DNA, 20 bp, synthetic construct
  misc_feature 1..20: note = Description of Artificial Sequence: Synthetic oligonucleotide
  misc_feature 1..20: note = Target: ANGPTL4; (+) strand; PAM type: NRG; PAM sequence: GAG
  source 1..20: mol_type = other DNA
ctgtaatcccagctacttgg

SEQ ID NO: 10829 - DNA, 20 bp, synthetic construct
  misc_feature 1..20: note = Description of Artificial Sequence: Synthetic oligonucleotide
  misc_feature 1..20: note = Target: ANGPTL4; (+) strand; PAM type: NRG; PAM sequence: AGG
  source 1..20: mol_type = other DNA
tgtaatcccagctacttggg

SEQ ID NO: 10830 - DNA, 20 bp, synthetic construct
  misc_feature 1..20: note = Description of Artificial Sequence: Synthetic oligonucleotide
  misc_feature 1..20: note = Target: ANGPTL4; (+) strand; PAM type: NRG; PAM sequence: GAG
  source 1..20: mol_type = other DNA
tcccagctacttgggaggct

SEQ ID NO: 10831 - DNA, 20 bp, synthetic construct
  misc_feature 1..20: note = Description of Artificial Sequence: Synthetic oligonucleotide
  misc_feature 1..20: note = Target: ANGPTL4; (+) strand; PAM type: NRG; PAM sequence: AGG
  source 1..20: mol_type = other DNA
cccagctacttgggaggctg

SEQ ID NO: 10832 - DNA, 20 bp, synthetic construct
  misc_feature 1..20: note = Description of Artificial Sequence: Synthetic oligonucleotide
  misc_feature 1..20: note = Target: ANGPTL4; (+) strand; PAM type: NRG; PAM sequence: CAG
  source 1..20: mol_type = other DNA
agctacttgggaggctgagg

SEQ ID NO: 10833 - DNA, 20 bp, synthetic construct
  misc_feature 1..20: note = Description of Artificial Sequence: Synthetic oligonucleotide
  misc_feature 1..20: note = Target: ANGPTL4; (+) strand; PAM type: NRG; PAM sequence: AGG
  source 1..20: mol_type = other DNA
gctacttgggaggctgaggc

SEQ ID NO: 10834 - DNA, 20 bp, synthetic construct
  misc_feature 1..20: note = Description of Artificial Sequence: Synthetic oligonucleotide
  misc_feature 1..20: note = Target: ANGPTL4; (+) strand; PAM type: NRG; PAM sequence: GAG
  source 1..20: mol_type = other DNA
tacttgggaggctgaggcag

SEQ ID NO: 10835 - DNA, 20 bp, synthetic construct
  misc_feature 1..20: note = Description of Artificial Sequence: Synthetic oligonucleotide
  misc_feature 1..20: note = Target: ANGPTL4; (+) strand; PAM type: NRG; PAM sequence: CGG
  source 1..20: mol_type = other DNA
gcaggagaatctcttgaacc

SEQ ID NO: 10836 - DNA, 20 bp, synthetic construct
  misc_feature 1..20: note = Description of Artificial Sequence: Synthetic oligonucleotide
  misc_feature 1..20: note = Target: ANGPTL4; (+) strand; PAM type: NRG; PAM sequence: GGG
  source 1..20: mol_type = other DNA
caggagaatctcttgaaccc

SEQ ID NO: 10837 - DNA, 20 bp, synthetic construct
  misc_feature 1..20: note = Description of Artificial Sequence: Synthetic oligonucleotide
  misc_feature 1..20: note = Target: ANGPTL4; (+) strand; PAM type: NRG; PAM sequence: GAG
  source 1..20: mol_type = other DNA
ggagaatctcttgaacccgg

SEQ ID NO: 10838 - DNA, 20 bp, synthetic construct
  misc_feature 1..20: note = Description of Artificial Sequence: Synthetic oligonucleotide
  misc_feature 1..20: note = Target: ANGPTL4; (+) strand; PAM type: NRG; PAM sequence: AGG
  source 1..20: mol_type = other DNA
gagaatctcttgaacccggg

SEQ ID NO: 10839 - DNA, 20 bp, synthetic construct
  misc_feature 1..20: note = Description of Artificial Sequence: Synthetic oligonucleotide
  misc_feature 1..20: note = Target: ANGPTL4; (+) strand; PAM type: NRG; PAM sequence: CAG
  source 1..20: mol_type = other DNA
aatctcttgaacccgggagg

SEQ ID NO: 10840 - DNA, 20 bp, synthetic construct
  misc_feature 1..20: note = Description of Artificial Sequence: Synthetic oligonucleotide
  misc_feature 1..20: note = Target: ANGPTL4; (+) strand; PAM type: NRG; PAM sequence: GAG
  source 1..20: mol_type = other DNA
tctcttgaacccgggaggca

SEQ ID NO: 10841 - DNA, 20 bp, synthetic construct
  misc_feature 1..20: note = Description of Artificial Sequence: Synthetic oligonucleotide
  misc_feature 1..20: note = Target: ANGPTL4; (+) strand; PAM type: NRG; PAM sequence: AGG
  source 1..20: mol_type = other DNA
ctcttgaacccgggaggcag

SEQ ID NO: 10842 - DNA, 20 bp, synthetic construct
  misc_feature 1..20: note = Description of Artificial Sequence: Synthetic oligonucleotide
  misc_feature 1..20: note = Target: ANGPTL4; (+) strand; PAM type: NRG; PAM sequence: CAG
  source 1..20: mol_type = other DNA
aacccgggaggcagaggttg

SEQ ID NO: 10843 - DNA, 20 bp, synthetic construct
  misc_feature 1..20: note = Description of Artificial Sequence: Synthetic oligonucleotide
  misc_feature 1..20: note = Target: ANGPTL4; (+) strand; PAM type: NRG; PAM sequence: GAG
  source 1..20: mol_type = other DNA
cgggaggcagaggttgcagt

SEQ ID NO: 10844 - DNA, 20 bp, synthetic construct
  misc_feature 1..20: note = Description of Artificial Sequence: Synthetic oligonucleotide
  misc_feature 1..20: note = Target: ANGPTL4; (+) strand; PAM type: NRG; PAM sequence: GAG
  source 1..20: mol_type = other DNA
ggcagaggttgcagtgagcc

SEQ ID NO: 10845 - DNA, 20 bp, synthetic construct
  misc_feature 1..20: note = Description of Artificial Sequence: Synthetic oligonucleotide
  misc_feature 1..20: note = Target: ANGPTL4; (+) strand; PAM type: NRG; PAM sequence: CAG
  source 1..20: mol_type = other DNA
gttgcagtgagccgagatcg

SEQ ID NO: 10846 - DNA, 20 bp, synthetic construct
  misc_feature 1..20: note = Description of Artificial Sequence: Synthetic oligonucleotide
  misc_feature 1..20: note = Target: ANGPTL4; (+) strand; PAM type: NRG; PAM sequence: CAG
  source 1..20: mol_type = other DNA
gagatcgcagcactgcactc

SEQ ID NO: 10847 - DNA, 20 bp, synthetic construct
  misc_feature 1..20: note = Description of Artificial Sequence: Synthetic oligonucleotide
  misc_feature 1..20: note = Target: ANGPTL4; (+) strand; PAM type: NRG; PAM sequence: TGG
  source 1..20: mol_type = other DNA
cgcagcactgcactccagcc

SEQ ID NO: 10848 - DNA, 20 bp, synthetic construct
  misc_feature 1..20: note = Description of Artificial Sequence: Synthetic oligonucleotide
  misc_feature 1..20: note = Target: ANGPTL4; (+) strand; PAM type: NRG; PAM sequence: GGG
  source 1..20: mol_type = other DNA
gcagcactgcactccagcct

SEQ ID NO: 10849 - DNA, 20 bp, synthetic construct
  misc_feature 1..20: note = Description of Artificial Sequence: Synthetic oligonucleotide
  misc_feature 1..20: note = Target: ANGPTL4; (+) strand; PAM type: NRG; PAM sequence: CAG
  source 1..20: mol_type = other DNA
ctgcactccagcctgggcaa

SEQ ID NO: 10850 - DNA, 20 bp, synthetic construct
  misc_feature 1..20: note = Description of Artificial Sequence: Synthetic oligonucleotide
  misc_feature 1..20: note = Target: ANGPTL4; (+) strand; PAM type: NRG; PAM sequence: GAG
  source 1..20: mol_type = other DNA
gcactccagcctgggcaaca

SEQ ID NO: 10851 - DNA, 20 bp, synthetic construct
  misc_feature 1..20: note = Description of Artificial Sequence: Synthetic oligonucleotide
  misc_feature 1..20: note = Target: ANGPTL4; (+) strand; PAM type: NRG; PAM sequence: GAG
  source 1..20: mol_type = other DNA
tccagcctgggcaacagagt

SEQ ID NO: 10852 - DNA, 20 bp, synthetic construct
  misc_feature 1..20: note = Description of Artificial Sequence: Synthetic oligonucleotide
  misc_feature 1..20: note = Target: ANGPTL4; (+) strand; PAM type: NRG; PAM sequence: TAG
  source 1..20: mol_type = other DNA
gagactcctcaaaaaaataa

SEQ ID NO: 10853 - DNA, 20 bp, synthetic construct
  misc_feature 1..20: note = Description of Artificial Sequence: Synthetic oligonucleotide
  misc_feature 1..20: note = Target: ANGPTL4; (+) strand; PAM type: NRG; PAM sequence: AAG
  source 1..20: mol_type = other DNA
atagcgataaaataaaaata

SEQ ID NO: 10854 - DNA, 20 bp, synthetic construct
  misc_feature 1..20: note = Description of Artificial Sequence: Synthetic oligonucleotide
  misc_feature 1..20: note = Target: ANGPTL4; (+) strand; PAM type: NRG; PAM sequence: CAG
  source 1..20: mol_type = other DNA
cgataaaataaaaataaagc

SEQ ID NO: 10855 - DNA, 20 bp, synthetic construct
  misc_feature 1..20: note = Description of Artificial Sequence: Synthetic oligonucleotide
  misc_feature 1..20: note = Target: ANGPTL4; (+) strand; PAM type: NRG; PAM sequence: AGG
  source 1..20: mol_type = other DNA
gataaaataaaaataaagcc

SEQ ID NO: 10856 - DNA, 20 bp, synthetic construct
  misc_feature 1..20: note = Description of Artificial Sequence: Synthetic oligonucleotide
  misc_feature 1..20: note = Target: ANGPTL4; (+) strand; PAM type: NRG; PAM sequence: CGG
  source 1..20: mol_type = other DNA
aataaaaataaagccaggtg

SEQ ID NO: 10857 - DNA, 20 bp, synthetic construct
  misc_feature 1..20: note = Description of Artificial Sequence: Synthetic oligonucleotide
  misc_feature 1..20: note = Target: ANGPTL4; (+) strand; PAM type: NRG; PAM sequence: TAG
  source 1..20: mol_type = other DNA
ggtgcggtgactcacgcttg

SEQ ID NO: 10858 - DNA, 20 bp, synthetic construct
  misc_feature 1..20: note = Description of Artificial Sequence: Synthetic oligonucleotide
  misc_feature 1..20: note = Target: ANGPTL4; (+) strand; PAM type: NRG; PAM sequence: CAG
  source 1..20: mol_type = other DNA
gtgactcacgcttgtagtcc

SEQ ID NO: 10859 - DNA, 20 bp, synthetic construct
  misc_feature 1..20: note = Description of Artificial Sequence: Synthetic oligonucleotide
  misc_feature 1..20: note = Target: ANGPTL4; (+) strand; PAM type: NRG; PAM sequence: TGG
  source 1..20: mol_type = other DNA
cgcttgtagtcccagcactt

SEQ ID NO: 10860 - DNA, 20 bp, synthetic construct
  misc_feature 1..20: note = Description of Artificial Sequence: Synthetic oligonucleotide
  misc_feature 1..20: note = Target: ANGPTL4; (+) strand; PAM type: NRG; PAM sequence: GGG
  source 1..20: mol_type = other DNA
gcttgtagtcccagcacttt

SEQ ID NO: 10861 - DNA, 20 bp, synthetic construct
  misc_feature 1..20: note = Description of Artificial Sequence: Synthetic oligonucleotide
  misc_feature 1..20: note = Target: ANGPTL4; (+) strand; PAM type: NRG; PAM sequence: GAG
  source 1..20: mol_type = other DNA
ttgtagtcccagcactttgg

SEQ ID NO: 10862 - DNA, 20 bp, synthetic construct
  misc_feature 1..20: note = Description of Artificial Sequence: Synthetic oligonucleotide
  misc_feature 1..20: note = Target: ANGPTL4; (+) strand; PAM type: NRG; PAM sequence: AGG
  source 1..20: mol_type = other DNA
tgtagtcccagcactttggg

SEQ ID NO: 10863 - DNA, 20 bp, synthetic construct
  misc_feature 1..20: note = Description of Artificial Sequence: Synthetic oligonucleotide
  misc_feature 1..20: note = Target: ANGPTL4; (+) strand; PAM type: NRG; PAM sequence: GGG
  source 1..20: mol_type = other DNA
gtagtcccagcactttggga

SEQ ID NO: 10864 - DNA, 20 bp, synthetic construct
  misc_feature 1..20: note = Description of Artificial Sequence: Synthetic oligonucleotide
  misc_feature 1..20: note = Target: ANGPTL4; (+) strand; PAM type: NRG; PAM sequence: GAG
  source 1..20: mol_type = other DNA
tcccagcactttgggagggc

SEQ ID NO: 10865 - DNA, 20 bp, synthetic construct
  misc_feature 1..20: note = Description of Artificial Sequence: Synthetic oligonucleotide
  misc_feature 1..20: note = Target: ANGPTL4; (+) strand; PAM type: NRG; PAM sequence: AGG
  source 1..20: mol_type = other DNA
cccagcactttgggagggcg

SEQ ID NO: 10866 - DNA, 20 bp, synthetic construct
  misc_feature 1..20: note = Description of Artificial Sequence: Synthetic oligonucleotide
  misc_feature 1..20: note = Target: ANGPTL4; (+) strand; PAM type: NRG; PAM sequence: CAG
  source 1..20: mol_type = other DNA
gcactttgggagggcgaggc

SEQ ID NO: 10867 - DNA, 20 bp, synthetic construct
  misc_feature 1..20: note = Description of Artificial Sequence: Synthetic oligonucleotide
  misc_feature 1..20: note = Target: ANGPTL4; (+) strand; PAM type: NRG; PAM sequence: TGG
  source 1..20: mol_type = other DNA
ctttgggagggcgaggccag

SEQ ID NO: 10868 - DNA, 20 bp, synthetic construct
  misc_feature 1..20: note = Description of Artificial Sequence: Synthetic oligonucleotide
  misc_feature 1..20: note = Target: ANGPTL4; (+) strand; PAM type: NRG; PAM sequence: GAG
  source 1..20: mol_type = other DNA
gcgaggccagtggatcacct

SEQ ID NO: 10869 - DNA, 20 bp, synthetic construct
  misc_feature 1..20: note = Description of Artificial Sequence: Synthetic oligonucleotide
  misc_feature 1..20: note = Target: ANGPTL4; (+) strand; PAM type: NRG; PAM sequence: AGG
  source 1..20: mol_type = other DNA
cgaggccagtggatcacctg

SEQ ID NO: 10870 - DNA, 20 bp, synthetic construct
  misc_feature 1..20: note = Description of Artificial Sequence: Synthetic oligonucleotide
  misc_feature 1..20: note = Target: ANGPTL4; (+) strand; PAM type: NRG; PAM sequence: CAG
  source 1..20: mol_type = other DNA
gccagtggatcacctgaggt

SEQ ID NO: 10871 - DNA, 20 bp, synthetic construct
  misc_feature 1..20: note = Description of Artificial Sequence: Synthetic oligonucleotide
  misc_feature 1..20: note = Target: ANGPTL4; (+) strand; PAM type: NRG; PAM sequence: AGG
  source 1..20: mol_type = other DNA
ccagtggatcacctgaggtc

SEQ ID NO: 10872 - DNA, 20 bp, synthetic construct
  misc_feature 1..20: note = Description of Artificial Sequence: Synthetic oligonucleotide
  misc_feature 1..20: note = Target: ANGPTL4; (+) strand; PAM type: NRG; PAM sequence: GAG
  source 1..20: mol_type = other DNA
agtggatcacctgaggtcag

SEQ ID NO: 10873 - DNA, 20 bp, synthetic construct
  misc_feature 1..20: note = Description of Artificial Sequence: Synthetic oligonucleotide
  misc_feature 1..20: note = Target: ANGPTL4; (+) strand; PAM type: NRG; PAM sequence: AAG
  source 1..20: mol_type = other DNA
tcacctgaggtcaggagttc

SEQ ID NO: 10874 - DNA, 20 bp, synthetic construct
  misc_feature 1..20: note = Description of Artificial Sequence: Synthetic oligonucleotide
  misc_feature 1..20: note = Target: ANGPTL4; (+) strand; PAM type: NRG; PAM sequence: CAG
  source 1..20: mol_type = other DNA
tgaggtcaggagttcaagac

SEQ ID NO: 10875 - DNA, 20 bp, synthetic construct
  misc_feature 1..20: note = Description of Artificial Sequence: Synthetic oligonucleotide
  misc_feature 1..20: note = Target: ANGPTL4; (+) strand; PAM type: NRG; PAM sequence: CAG
  source 1..20: mol_type = other DNA
caagaccagcctgaccaaca

SEQ ID NO: 10876 - DNA, 20 bp, synthetic construct
  misc_feature 1..20: note = Description of Artificial Sequence: Synthetic oligonucleotide
  misc_feature 1..20: note = Target: ANGPTL4; (+) strand; PAM type: NRG; PAM sequence: TAG
  source 1..20: mol_type = other DNA
tctactaaaaatacaaaaat

SEQ ID NO: 10877 - DNA, 20 bp, synthetic construct
  misc_feature 1..20: note = Description of Artificial Sequence: Synthetic oligonucleotide
  misc_feature 1..20: note = Target: ANGPTL4; (+) strand; PAM type: NRG; PAM sequence: TGG
  source 1..20: mol_type = other DNA
ctaaaaatacaaaaattagc

SEQ ID NO: 10878 - DNA, 20 bp, synthetic construct
  misc_feature 1..20: note = Description of Artificial Sequence: Synthetic oligonucleotide
  misc_feature 1..20: note = Target: ANGPTL4; (+) strand; PAM type: NRG; PAM sequence: GGG
  source 1..20: mol_type = other DNA
taaaaatacaaaaattagct

SEQ ID NO: 10879 - DNA, 20 bp, synthetic construct
  misc_feature 1..20: note = Description of Artificial Sequence: Synthetic oligonucleotide
  misc_feature 1..20: note = Target: ANGPTL4; (+) strand; PAM type: NRG; PAM sequence: TGG
  source 1..20: mol_type = other DNA
atacaaaaattagctgggtg

SEQ ID NO: 10880 - DNA, 20 bp, synthetic construct
  misc_feature 1..20: note = Description of Artificial Sequence: Synthetic oligonucleotide
  misc_feature 1..20: note = Target: ANGPTL4; (+) strand; PAM type: NRG; PAM sequence: TGG
  source 1..20: mol_type = other DNA
caaaaattagctgggtgtgg

SEQ ID NO: 10881 - DNA, 20 bp, synthetic construct
  misc_feature 1..20: note = Description of Artificial Sequence: Synthetic oligonucleotide
  misc_feature 1..20: note = Target: ANGPTL4; (+) strand; PAM type: NRG; PAM sequence: TGG
  source 1..20: mol_type = other DNA
aaattagctgggtgtggtgg

SEQ ID NO: 10882 - DNA, 20 bp, synthetic construct
  misc_feature 1..20: note = Description of Artificial Sequence: Synthetic oligonucleotide
  misc_feature 1..20: note = Target: ANGPTL4; (+) strand; PAM type: NRG; PAM sequence: GGG
  source 1..20: mol_type = other DNA
aattagctgggtgtggtggt

SEQ ID NO: 10883 - DNA, 20 bp, synthetic construct
  misc_feature 1..20: note = Description of Artificial Sequence: Synthetic oligonucleotide
  misc_feature 1..20: note = Target: ANGPTL4; (+) strand; PAM type: NRG; PAM sequence: CAG
  source 1..20: mol_type = other DNA
gtggtgggcgcctgtaatcc

SEQ ID NO: 10884 - DNA, 20 bp, synthetic construct
  misc_feature 1..20: note = Description of Artificial Sequence: Synthetic oligonucleotide
  misc_feature 1..20: note = Target: ANGPTL4; (+) strand; PAM type: NRG; PAM sequence: TGG
  source 1..20: mol_type = other DNA
gcgcctgtaatcccagctac

SEQ ID NO: 10885 - DNA, 20 bp, synthetic construct
  misc_feature 1..20: note = Description of Artificial Sequence: Synthetic oligonucleotide
  misc_feature 1..20: note = Target: ANGPTL4; (+) strand; PAM type: NRG; PAM sequence: GGG
  source 1..20: mol_type = other DNA
cgcctgtaatcccagctact

SEQ ID NO: 10886 - DNA, 20 bp, synthetic construct
  misc_feature 1..20: note = Description of Artificial Sequence: Synthetic oligonucleotide
  misc_feature 1..20: note = Target: ANGPTL4; (+) strand; PAM type: NRG; PAM sequence: GGG
  source 1..20: mol_type = other DNA
gcctgtaatcccagctactg

SEQ ID NO: 10887 - DNA, 20 bp, synthetic construct
  misc_feature 1..20: note = Description of Artificial Sequence: Synthetic oligonucleotide
  misc_feature 1..20: note = Target: ANGPTL4; (+) strand; PAM type: NRG; PAM sequence: GAG
  source 1..20: mol_type = other DNA
ctgtaatcccagctactggg

SEQ ID NO: 10888 - DNA, 20 bp, synthetic construct
  misc_feature 1..20: note = Description of Artificial Sequence: Synthetic oligonucleotide
  misc_feature 1..20: note = Target: ANGPTL4; (+) strand; PAM type: NRG; PAM sequence: AGG
  source 1..20: mol_type = other DNA
tgtaatcccagctactgggg

SEQ ID NO: 10889 - DNA, 20 bp, synthetic construct
  misc_feature 1..20: note = Description of Artificial Sequence: Synthetic oligonucleotide
  misc_feature 1..20: note = Target: ANGPTL4; (+) strand; PAM type: NRG; PAM sequence: GAG
  source 1..20: mol_type = other DNA
tcccagctactggggaggct

SEQ ID NO: 10890 - DNA, 20 bp, synthetic construct
  misc_feature 1..20: note = Description of Artificial Sequence: Synthetic oligonucleotide
  misc_feature 1..20: note = Target: ANGPTL4; (+) strand; PAM type: NRG; PAM sequence: AGG
  source 1..20: mol_type = other DNA
cccagctactggggaggctg

SEQ ID NO: 10891 - DNA, 20 bp, synthetic construct
  misc_feature 1..20: note = Description of Artificial Sequence: Synthetic oligonucleotide
  misc_feature 1..20: note = Target: ANGPTL4; (+) strand; PAM type: NRG; PAM sequence: CAG
  source 1..20: mol_type = other DNA
agctactggggaggctgagg

SEQ ID NO: 10892 - DNA, 20 bp, synthetic construct
  misc_feature 1..20: note = Description of Artificial Sequence: Synthetic oligonucleotide
  misc_feature 1..20: note = Target: ANGPTL4; (+) strand; PAM type: NRG; PAM sequence: AGG
  source 1..20: mol_type = other DNA
gctactggggaggctgaggc

SEQ ID NO: 10893 - DNA, 20 bp, synthetic construct
  misc_feature 1..20: note = Description of Artificial Sequence: Synthetic oligonucleotide
  misc_feature 1..20: note = Target: ANGPTL4; (+) strand; PAM type: NRG; PAM sequence: GAG
  source 1..20: mol_type = other DNA
tactggggaggctgaggcag

SEQ ID NO: 10894 - DNA, 20 bp, synthetic construct
  misc_feature 1..20: note = Description of Artificial Sequence: Synthetic oligonucleotide
  misc_feature 1..20: note = Target: ANGPTL4; (+) strand; PAM type: NRG; PAM sequence: CGG
  source 1..20: mol_type = other DNA
gcaggagaacctcttgaacc

SEQ ID NO: 10895 - DNA, 20 bp, synthetic construct
  misc_feature 1..20: note = Description of Artificial Sequence: Synthetic oligonucleotide
  misc_feature 1..20: note = Target: ANGPTL4; (+) strand; PAM type: NRG; PAM sequence: GGG
  source 1..20: mol_type = other DNA
caggagaacctcttgaaccc

SEQ ID NO: 10896 - DNA, 20 bp, synthetic construct
  misc_feature 1..20: note = Description of Artificial Sequence: Synthetic oligonucleotide
  misc_feature 1..20: note = Target: ANGPTL4; (+) strand; PAM type: NRG; PAM sequence: GAG
  source 1..20: mol_type = other DNA
ggagaacctcttgaacccgg

SEQ ID NO: 10897 - DNA, 20 bp, synthetic construct
  misc_feature 1..20: note = Description of Artificial Sequence: Synthetic oligonucleotide
  misc_feature 1..20: note = Target: ANGPTL4; (+) strand; PAM type: NRG; PAM sequence: AGG
  source 1..20: mol_type = other DNA
gagaacctcttgaacccggg

SEQ ID NO: 10898 - DNA, 20 bp, synthetic construct
  misc_feature 1..20: note = Description of Artificial Sequence: Synthetic oligonucleotide
  misc_feature 1..20: note = Target: ANGPTL4; (+) strand; PAM type: NRG; PAM sequence: CGG
  source 1..20: mol_type = other DNA
aacctcttgaacccgggagg

SEQ ID NO: 10899 - DNA, 20 bp, synthetic construct
  misc_feature 1..20: note = Description of Artificial Sequence: Synthetic oligonucleotide
  misc_feature 1..20: note = Target: ANGPTL4; (+) strand; PAM type: NRG; PAM sequence: GAG
  source 1..20: mol_type = other DNA
cctcttgaacccgggaggcg

SEQ ID NO: 10900 - DNA, 20 bp, synthetic construct
  misc_feature 1..20: note = Description of Artificial Sequence: Synthetic oligonucleotide
  misc_feature 1..20: note = Target: ANGPTL4; (+) strand; PAM type: NRG; PAM sequence: AGG
  source 1..20: mol_type = other DNA
ctcttgaacccgggaggcgg

SEQ ID NO: 10901 - DNA, 20 bp, synthetic construct
  misc_feature 1..20: note = Description of Artificial Sequence: Synthetic oligonucleotide
  misc_feature 1..20: note = Target: ANGPTL4; (+) strand; PAM type: NRG; PAM sequence: CAG
  source 1..20: mol_type = other DNA
aacccgggaggcggaggttg

SEQ ID NO: 10902 - DNA, 20 bp, synthetic construct
  misc_feature 1..20: note = Description of Artificial Sequence: Synthetic oligonucleotide
  misc_feature 1..20: note = Target: ANGPTL4; (+) strand; PAM type: NRG; PAM sequence: GAG
  source 1..20: mol_type = other DNA
cgggaggcggaggttgcagt

SEQ ID NO: 10903 - DNA, 20 bp, synthetic construct
  misc_feature 1..20: note = Description of Artificial Sequence: Synthetic oligonucleotide
  misc_feature 1..20: note = Target: ANGPTL4; (+) strand; PAM type: NRG; PAM sequence: CGG
  source 1..20: mol_type = other DNA
aggcggaggttgcagtgagc

SEQ ID NO: 10904 - DNA, 20 bp, synthetic construct
  misc_feature 1..20: note = Description of Artificial Sequence: Synthetic oligonucleotide
  misc_feature 1..20: note = Target: ANGPTL4; (+) strand; PAM type: NRG; PAM sequence: GGG
  source 1..20: mol_type = other DNA
ggcggaggttgcagtgagcc

SEQ ID NO: 10905 - DNA, 20 bp, synthetic construct
  misc_feature 1..20: note = Description of Artificial Sequence: Synthetic oligonucleotide
  misc_feature 1..20: note = Target: ANGPTL4; (+) strand; PAM type: NRG; PAM sequence: CAG
  source 1..20: mol_type = other DNA
gggatcatgccattgcactc

SEQ ID NO: 10906 - DNA, 20 bp, synthetic construct
  misc_feature 1..20: note = Description of Artificial Sequence: Synthetic oligonucleotide
  misc_feature 1..20: note = Target: ANGPTL4; (+) strand; PAM type: NRG; PAM sequence: TGG
  source 1..20: mol_type = other DNA
catgccattgcactccagcc

SEQ ID NO: 10907 - DNA, 20 bp, synthetic construct
  misc_feature 1..20: note = Description of Artificial Sequence: Synthetic oligonucleotide
  misc_feature 1..20: note = Target: ANGPTL4; (+) strand; PAM type: NRG; PAM sequence: GGG
  source 1..20: mol_type = other DNA
atgccattgcactccagcct

SEQ ID NO: 10908 - DNA, 20 bp, synthetic construct
  misc_feature 1..20: note = Description of Artificial Sequence: Synthetic oligonucleotide
  misc_feature 1..20: note = Target: ANGPTL4; (+) strand; PAM type: NRG; PAM sequence: CAG
  source 1..20: mol_type = other DNA
ttgcactccagcctgggcga

SEQ ID NO: 10909 - DNA, 20 bp, synthetic construct
  misc_feature 1..20: note = Description of Artificial Sequence: Synthetic oligonucleotide
  misc_feature 1..20: note = Target: ANGPTL4; (+) strand; PAM type: NRG; PAM sequence: GAG
  source 1..20: mol_type = other DNA
gcactccagcctgggcgaca

SEQ ID NO: 10910 - DNA, 20 bp, synthetic construct
  misc_feature 1..20: note = Description of Artificial Sequence: Synthetic oligonucleotide
  misc_feature 1..20: note = Target: ANGPTL4; (+) strand; PAM type: NRG; PAM sequence: TAG
  source 1..20: mol_type = other DNA
taaaatacaaatacaaaaat

SEQ ID NO: 10911 - DNA, 20 bp, synthetic construct
  misc_feature 1..20: note = Description of Artificial Sequence: Synthetic oligonucleotide
  misc_feature 1..20: note = Target: ANGPTL4; (+) strand; PAM type: NRG; PAM sequence: CAG
  source 1..20: mol_type = other DNA
atacaaatacaaaaattagc

SEQ ID NO: 10912 - DNA, 20 bp, synthetic construct
  misc_feature 1..20: note = Description of Artificial Sequence: Synthetic oligonucleotide
  misc_feature 1..20: note = Target: ANGPTL4; (+) strand; PAM type: NRG; PAM sequence: AGG
  source 1..20: mol_type = other DNA
tacaaatacaaaaattagcc

SEQ ID NO: 10913 - DNA, 20 bp, synthetic construct
  misc_feature 1..20: note = Description of Artificial Sequence: Synthetic oligonucleotide
  misc_feature 1..20: note = Target: ANGPTL4; (+) strand; PAM type: NRG; PAM sequence: TGG
  source 1..20: mol_type = other DNA
atacaaaaattagccaggtg

SEQ ID NO: 10914 - DNA, 20 bp, synthetic construct
  misc_feature 1..20: note = Description of Artificial Sequence: Synthetic oligonucleotide
  misc_feature 1..20: note = Target: ANGPTL4; (+) strand; PAM type: NRG; PAM sequence: TGG
  source 1..20: mol_type = other DNA
caaaaattagccaggtgtgg

SEQ ID NO: 10915 - DNA, 20 bp, synthetic construct
  misc_feature 1..20: note = Description of Artificial Sequence: Synthetic oligonucleotide
  misc_feature 1..20: note = Target: ANGPTL4; (+) strand; PAM type: NRG; PAM sequence: CAG
  source 1..20: mol_type = other DNA
aaattagccaggtgtggtgg

SEQ ID NO: 10916 - DNA, 20 bp, synthetic construct
  misc_feature 1..20: note = Description of Artificial Sequence: Synthetic oligonucleotide
  misc_feature 1..20: note = Target: ANGPTL4; (+) strand; PAM type: NRG; PAM sequence: TGG
  source 1..20: mol_type = other DNA
caggtgtggtggcagctact

SEQ ID NO: 10917 - DNA, 20 bp, synthetic construct
  misc_feature 1..20: note = Description of Artificial Sequence: Synthetic oligonucleotide
  misc_feature 1..20: note = Target: ANGPTL4; (+) strand; PAM type: NRG; PAM sequence: GGG
  source 1..20: mol_type = other DNA
aggtgtggtggcagctactt

SEQ ID NO: 10918 - DNA, 20 bp, synthetic construct
  misc_feature 1..20: note = Description of Artificial Sequence: Synthetic oligonucleotide
  misc_feature 1..20: note = Target: ANGPTL4; (+) strand; PAM type: NRG; PAM sequence: GAG
  source 1..20: mol_type = other DNA
gtgtggtggcagctacttgg

SEQ ID NO: 10919 - DNA, 20 bp, synthetic construct
  misc_feature 1..20: note = Description of Artificial Sequence: Synthetic oligonucleotide
  misc_feature 1..20: note = Target: ANGPTL4; (+) strand; PAM type: NRG; PAM sequence: AGG
  source 1..20: mol_type = other DNA
tgtggtggcagctacttggg

SEQ ID NO: 10920 - DNA, 20 bp, synthetic construct
  misc_feature 1..20: note = Description of Artificial Sequence: Synthetic oligonucleotide
  misc_feature 1..20: note = Target: ANGPTL4; (+) strand; PAM type: NRG; PAM sequence: GAG
  source 1..20: mol_type = other DNA
tggcagctacttgggaggct

SEQ ID NO: 10921 - DNA, 20 bp, synthetic construct
  misc_feature 1..20: note = Description of Artificial Sequence: Synthetic oligonucleotide
  misc_feature 1..20: note = Target: ANGPTL4; (+) strand; PAM type: NRG; PAM sequence: AAG
  source 1..20: mol_type = other DNA
tacttgggaggctgagacac

SEQ ID NO: 10922 - DNA, 20 bp, synthetic construct
  misc_feature 1..20: note = Description of Artificial Sequence: Synthetic oligonucleotide
  misc_feature 1..20: note = Target: ANGPTL4; (+) strand; PAM type: NRG; PAM sequence: GAG
  source 1..20: mol_type = other DNA
ctgagacacaagaatcactt

SEQ ID NO: 10923 - DNA, 20 bp, synthetic construct
  misc_feature 1..20: note = Description of Artificial Sequence: Synthetic oligonucleotide
  misc_feature 1..20: note = Target: ANGPTL4; (+) strand; PAM type: NRG; PAM sequence: TGG
  source 1..20: mol_type = other DNA
acacaagaatcacttgagtc

SEQ ID NO: 10924 - DNA, 20 bp, synthetic construct
  misc_feature 1..20: note = Description of Artificial Sequence: Synthetic oligonucleotide
  misc_feature 1..20: note = Target: ANGPTL4; (+) strand; PAM type: NRG; PAM sequence: GGG
  source 1..20: mol_type = other DNA
cacaagaatcacttgagtct

SEQ ID NO: 10925 - DNA, 20 bp, synthetic construct
  misc_feature 1..20: note = Description of Artificial Sequence: Synthetic oligonucleotide
  misc_feature 1..20: note = Target: ANGPTL4; (+) strand; PAM type: NRG; PAM sequence: GAG
  source 1..20: mol_type = other DNA
caagaatcacttgagtctgg

SEQ ID NO: 10926 - DNA, 20 bp, synthetic construct
  misc_feature 1..20: note = Description of Artificial Sequence: Synthetic oligonucleotide
  misc_feature 1..20: note = Target: ANGPTL4; (+) strand; PAM type: NRG; PAM sequence: AGG
  source 1..20: mol_type = other DNA
aagaatcacttgagtctggg

SEQ ID NO: 10927 - DNA, 20 bp, synthetic construct
  misc_feature 1..20: note = Description of Artificial Sequence: Synthetic oligonucleotide
  misc_feature 1..20: note = Target: ANGPTL4; (+) strand; PAM type: NRG; PAM sequence: CAG
  source 1..20: mol_type = other DNA
aatcacttgagtctgggagg

SEQ ID NO: 10928 - DNA, 20 bp, synthetic construct
  misc_feature 1..20: note = Description of Artificial Sequence: Synthetic oligonucleotide
  misc_feature 1..20: note = Target: ANGPTL4; (+) strand; PAM type: NRG; PAM sequence: GAG
  source 1..20: mol_type = other DNA
tcacttgagtctgggaggca

SEQ ID NO: 10929 - DNA, 20 bp, synthetic construct
  misc_feature 1..20: note = Description of Artificial Sequence: Synthetic oligonucleotide
  misc_feature 1..20: note = Target: ANGPTL4; (+) strand; PAM type: NRG; PAM sequence: AGG
  source 1..20: mol_type = other DNA
cacttgagtctgggaggcag

SEQ ID NO: 10930 - DNA, 20 bp, synthetic construct
  misc_feature 1..20: note = Description of Artificial Sequence: Synthetic oligonucleotide
  misc_feature 1..20: note = Target: ANGPTL4; (+) strand; PAM type: NRG; PAM sequence: CAG
  source 1..20: mol_type = other DNA
agtctgggaggcagaggttg

SEQ ID NO: 10931 - DNA, 20 bp, synthetic construct
  misc_feature 1..20: note = Description of Artificial Sequence: Synthetic oligonucleotide
  misc_feature 1..20: note = Target: ANGPTL4; (+) strand; PAM type: NRG; PAM sequence: GAG
  source 1..20: mol_type = other DNA
tgggaggcagaggttgcagt

SEQ ID NO: 10932 - DNA, 20 bp, synthetic construct
  misc_feature 1..20: note = Description of Artificial Sequence: Synthetic oligonucleotide
  misc_feature 1..20: note = Target: ANGPTL4; (+) strand; PAM type: NRG; PAM sequence: AAG
  source 1..20: mol_type = other DNA
ggcagaggttgcagtgagcc

SEQ ID NO: 10933 - DNA, 20 bp, synthetic construct
  misc_feature 1..20: note = Description of Artificial Sequence: Synthetic oligonucleotide
  misc_feature 1..20: note = Target: ANGPTL4; (+) strand; PAM type: NRG; PAM sequence: TGG
  source 1..20: mol_type = other DNA
tgcgccactgcactccaacc

SEQ ID NO: 10934 - DNA, 20 bp, synthetic construct
  misc_feature 1..20: note = Description of Artificial Sequence: Synthetic oligonucleotide
  misc_feature 1..20: note = Target: ANGPTL4; (+) strand; PAM type: NRG; PAM sequence: GGG
  source 1..20: mol_type = other DNA
gcgccactgcactccaacct

SEQ ID NO: 10935 - DNA, 20 bp, synthetic construct
  misc_feature 1..20: note = Description of Artificial Sequence: Synthetic oligonucleotide
  misc_feature 1..20: note = Target: ANGPTL4; (+) strand; PAM type: NRG; PAM sequence: CAG
  source 1..20: mol_type = other DNA
ctgcactccaacctgggtga

SEQ ID NO: 10936 - DNA, 20 bp, synthetic construct
  misc_feature 1..20: note = Description of Artificial Sequence: Synthetic oligonucleotide
  misc_feature 1..20: note = Target: ANGPTL4; (+) strand; PAM type: NRG; PAM sequence: GAG
  source 1..20: mol_type = other DNA
gcactccaacctgggtgaca

SEQ ID NO: 10937 - DNA, 20 bp, synthetic construct
  misc_feature 1..20: note = Description of Artificial Sequence: Synthetic oligonucleotide
  misc_feature 1..20: note = Target: ANGPTL4; (+) strand; PAM type: NRG; PAM sequence: GAG
  source 1..20: mol_type = other DNA
tccaacctgggtgacagagc

SEQ ID NO: 10938 - DNA, 20 bp, synthetic construct
  misc_feature 1..20: note = Description of Artificial Sequence: Synthetic oligonucleotide
  misc_feature 1..20: note = Target: ANGPTL4; (+) strand; PAM type: NRG; PAM sequence: AAG
  source 1..20: mol_type = other DNA
tgtctgaaaaaataaaaaat

SEQ ID NO: 10939 - DNA, 20 bp, synthetic construct
  misc_feature 1..20: note = Description of Artificial Sequence: Synthetic oligonucleotide
  misc_feature 1..20: note = Target: ANGPTL4; (+) strand; PAM type: NRG; PAM sequence: CAG
  source 1..20: mol_type = other DNA
tgaaaaaataaaaaataagc

SEQ ID NO: 10940 - DNA, 20 bp, synthetic construct
  misc_feature 1..20: note = Description of Artificial Sequence: Synthetic oligonucleotide
  misc_feature 1..20: note = Target: ANGPTL4; (+) strand; PAM type: NRG; PAM sequence: AGG
  source 1..20: mol_type = other DNA
gaaaaaataaaaaataagcc

SEQ ID NO: 10941 - DNA, 20 bp, synthetic construct
  misc_feature 1..20: note = Description of Artificial Sequence: Synthetic oligonucleotide
  misc_feature 1..20: note = Target: ANGPTL4; (+) strand; PAM type: NRG; PAM sequence: TAG
  source 1..20: mol_type = other DNA
aataaaaaataagccaggca

SEQ ID NO: 10942 - DNA, 20 bp, synthetic construct
  misc_feature 1..20: note = Description of Artificial Sequence: Synthetic oligonucleotide
  misc_feature 1..20: note = Target: ANGPTL4; (+) strand; PAM type: NRG; PAM sequence: GAG
  source 1..20: mol_type = other DNA
taaaaaataagccaggcata

SEQ ID NO: 10943 - DNA, 20 bp, synthetic construct
  misc_feature 1..20: note = Description of Artificial Sequence: Synthetic oligonucleotide
  misc_feature 1..20: note = Target: ANGPTL4; (+) strand; PAM type: NRG; PAM sequence: TAG
  source 1..20: mol_type = other DNA
ggcatagagctgcatgactg

SEQ ID NO: 10944 - DNA, 20 bp, synthetic construct
  misc_feature 1..20: note = Description of Artificial Sequence: Synthetic oligonucleotide
  misc_feature 1..20: note = Target: ANGPTL4; (+) strand; PAM type: NRG; PAM sequence: CAG
  source 1..20: mol_type = other DNA
gagctgcatgactgtagtcc

SEQ ID NO: 10945 - DNA, 20 bp, synthetic construct
  misc_feature 1..20: note = Description of Artificial Sequence: Synthetic oligonucleotide
  misc_feature 1..20: note = Target: ANGPTL4; (+) strand; PAM type: NRG; PAM sequence: CAG
  source 1..20: mol_type = other DNA
tgactgtagtcccagctaca

SEQ ID NO: 10946 - DNA, 20 bp, synthetic construct
  misc_feature 1..20: note = Description of Artificial Sequence: Synthetic oligonucleotide
  misc_feature 1..20: note = Target: ANGPTL4; (+) strand; PAM type: NRG; PAM sequence: AGG
  source 1..20: mol_type = other DNA
gactgtagtcccagctacac

SEQ ID NO: 10947 - DNA, 20 bp, synthetic construct
  misc_feature 1..20: note = Description of Artificial Sequence: Synthetic oligonucleotide
  misc_feature 1..20: note = Target: ANGPTL4; (+) strand; PAM type: NRG; PAM sequence: GAG
  source 1..20: mol_type = other DNA
ctgtagtcccagctacacag

SEQ ID NO: 10948 - DNA, 20 bp, synthetic construct
  misc_feature 1..20: note = Description of Artificial Sequence: Synthetic oligonucleotide
  misc_feature 1..20: note = Target: ANGPTL4; (+) strand; PAM type: NRG; PAM sequence: AGG
  source 1..20: mol_type = other DNA
tgtagtcccagctacacagg

SEQ ID NO: 10949 - DNA, 20 bp, synthetic construct
  misc_feature 1..20: note = Description of Artificial Sequence: Synthetic oligonucleotide
  misc_feature 1..20: note = Target: ANGPTL4; (+) strand; PAM type: NRG; PAM sequence: CAG
  source 1..20: mol_type = other DNA
gctacacaggaggctgaaaa

SEQ ID NO: 10950 - DNA, 20 bp, synthetic construct
  misc_feature 1..20: note = Description of Artificial Sequence: Synthetic oligonucleotide
  misc_feature 1..20: note = Target: ANGPTL4; (+) strand; PAM type: NRG; PAM sequence: AGG
  source 1..20: mol_type = other DNA
ctacacaggaggctgaaaac

SEQ ID NO: 10951 - DNA, 20 bp, synthetic construct
  misc_feature 1..20: note = Description of Artificial Sequence: Synthetic oligonucleotide
  misc_feature 1..20: note = Target: ANGPTL4; (+) strand; PAM type: NRG; PAM sequence: GAG
  source 1..20: mol_type = other DNA
acacaggaggctgaaaacag

SEQ ID NO: 10952 - DNA, 20 bp, synthetic construct
  misc_feature 1..20: note = Description of Artificial Sequence: Synthetic oligonucleotide
  misc_feature 1..20: note = Target: ANGPTL4; (+) strand; PAM type: NRG; PAM sequence: AGG
  source 1..20: mol_type = other DNA
cacaggaggctgaaaacagg

SEQ ID NO: 10953 - DNA, 20 bp, synthetic construct
  misc_feature 1..20: note = Description of Artificial Sequence: Synthetic oligonucleotide
  misc_feature 1..20: note = Target: ANGPTL4; (+) strand; PAM type: NRG; PAM sequence: CAG
  source 1..20: mol_type = other DNA
acaggaggatcgcctgaccc

SEQ ID NO: 10954 - DNA, 20 bp, synthetic construct
  misc_feature 1..20: note = Description of Artificial Sequence: Synthetic oligonucleotide
  misc_feature 1..20: note = Target: ANGPTL4; (+) strand; PAM type: NRG; PAM sequence: AGG
  source 1..20: mol_type = other DNA
caggaggatcgcctgacccc

SEQ ID NO: 10955 - DNA, 20 bp, synthetic construct
  misc_feature 1..20: note = Description of Artificial Sequence: Synthetic oligonucleotide
  misc_feature 1..20: note = Target: ANGPTL4; (+) strand; PAM type: NRG; PAM sequence: GAG
  source 1..20: mol_type = other DNA
ggaggatcgcctgaccccag

SEQ ID NO: 10956 - DNA, 20 bp, synthetic construct
  misc_feature 1..20: note = Description of Artificial Sequence: Synthetic oligonucleotide
  misc_feature 1..20: note = Target: ANGPTL4; (+) strand; PAM type: NRG; PAM sequence: TGG
  source 1..20: mol_type = other DNA
gatcgcctgaccccaggagt

SEQ ID NO: 10957 - DNA, 20 bp, synthetic construct
  misc_feature 1..20: note = Description of Artificial Sequence: Synthetic oligonucleotide
  misc_feature 1..20: note = Target: ANGPTL4; (+) strand; PAM type: NRG; PAM sequence: GAG
  source 1..20: mol_type = other DNA
tcgcctgaccccaggagttg

SEQ ID NO: 10958 - DNA, 20 bp, synthetic construct
  misc_feature 1..20: note = Description of Artificial Sequence: Synthetic oligonucleotide
  misc_feature 1..20: note = Target: ANGPTL4; (+) strand; PAM type: NRG; PAM sequence: AGG
  source 1..20: mol_type = other DNA
cgcctgaccccaggagttgg

SEQ ID NO: 10959 - DNA, 20 bp, synthetic construct
  misc_feature 1..20: note = Description of Artificial Sequence: Synthetic oligonucleotide
  misc_feature 1..20: note = Target: ANGPTL4; (+) strand; PAM type: NRG; PAM sequence: CAG
  source 1..20: mol_type = other DNA
accccaggagttggaggctg

SEQ ID NO: 10960 - DNA, 20 bp, synthetic construct
  misc_feature 1..20: note = Description of Artificial Sequence: Synthetic oligonucleotide
  misc_feature 1..20: note = Target: ANGPTL4; (+) strand; PAM type: NRG; PAM sequence: GAG
  source 1..20: mol_type = other DNA
caggagttggaggctgcagt

SEQ ID NO: 10961 - DNA, 20 bp, synthetic construct
  misc_feature 1..20: note = Description of Artificial Sequence: Synthetic oligonucleotide
  misc_feature 1..20: note = Target: ANGPTL4; (+) strand; PAM type: NRG; PAM sequence: CAG
  source 1..20: mol_type = other DNA
gaggctgcagtgagctgtga

SEQ ID NO: 10962 - DNA, 20 bp, synthetic construct
  misc_feature 1..20: note = Description of Artificial Sequence: Synthetic oligonucleotide
  misc_feature 1..20: note = Target: ANGPTL4; (+) strand; PAM type: NRG; PAM sequence: CAG
  source 1..20: mol_type = other DNA
gtgacagcaccactgcactc

SEQ ID NO: 10963 - DNA, 20 bp, synthetic construct
  misc_feature 1..20: note = Description of Artificial Sequence: Synthetic oligonucleotide
  misc_feature 1..20: note = Target: ANGPTL4; (+) strand; PAM type: NRG; PAM sequence: TGG
  source 1..20: mol_type = other DNA
agcaccactgcactccagcc

SEQ ID NO: 10964 - DNA, 20 bp, synthetic construct
  misc_feature 1..20: note = Description of Artificial Sequence: Synthetic oligonucleotide
  misc_feature 1..20: note = Target: ANGPTL4; (+) strand; PAM type: NRG; PAM sequence: GGG
  source 1..20: mol_type = other DNA
gcaccactgcactccagcct

SEQ ID NO: 10965 - DNA, 20 bp, synthetic construct
  misc_feature 1..20: note = Description of Artificial Sequence: Synthetic oligonucleotide
  misc_feature 1..20: note = Target: ANGPTL4; (+) strand; PAM type: NRG; PAM sequence: GAG
  source 1..20: mol_type = other DNA
cactgcactccagcctgggc

SEQ ID NO: 10966 - DNA, 20 bp, synthetic construct
  misc_feature 1..20: note = Description of Artificial Sequence: Synthetic oligonucleotide
  misc_feature 1..20: note = Target: ANGPTL4; (+) strand; PAM type: NRG; PAM sequence: GAG
  source 1..20: mol_type = other DNA
ctgcactccagcctgggcga

SEQ ID NO: 10967 - DNA, 20 bp, synthetic construct
  misc_feature 1..20: note = Description of Artificial Sequence: Synthetic oligonucleotide
  misc_feature 1..20: note = Target: ANGPTL4; (+) strand; PAM type: NRG; PAM sequence: GAG
  source 1..20: mol_type = other DNA
tccagcctgggcgagagaac

SEQ ID NO: 10968 - DNA, 20 bp, synthetic construct
  misc_feature 1..20: note = Description of Artificial Sequence: Synthetic oligonucleotide
  misc_feature 1..20: note = Target: ANGPTL4; (+) strand; PAM type: NRG; PAM sequence: TGG
  source 1..20: mol_type = other DNA
agagaacgagaccccgtcat

SEQ ID NO: 10969 - DNA, 20 bp, synthetic construct
  misc_feature 1..20: note = Description of Artificial Sequence: Synthetic oligonucleotide
  misc_feature 1..20: note = Target: ANGPTL4; (+) strand; PAM type: NRG; PAM sequence: GGG
  source 1..20: mol_type = other DNA
gagaacgagaccccgtcatt

SEQ ID NO: 10970 - DNA, 20 bp, synthetic construct
  misc_feature 1..20: note = Description of Artificial Sequence: Synthetic oligonucleotide
  misc_feature 1..20: note = Target: ANGPTL4; (+) strand; PAM type: NRG; PAM sequence: AAG
  source 1..20: mol_type = other DNA
accccgtcattgggaaaaaa

SEQ ID NO: 10971 - DNA, 20 bp, synthetic construct
  misc_feature 1..20: note = Description of Artificial Sequence: Synthetic oligonucleotide
  misc_feature 1..20: note = Target: ANGPTL4; (+) strand; PAM type: NRG; PAM sequence: AAG
  source 1..20: mol_type = other DNA
cattgggaaaaaaaagaaaa

SEQ ID NO: 10972 - DNA, 20 bp, synthetic construct
  misc_feature 1..20: note = Description of Artificial Sequence: Synthetic oligonucleotide
  misc_feature 1..20: note = Target: ANGPTL4; (+) strand; PAM type: NRG; PAM sequence: AAG
  source 1..20: mol_type = other DNA
gggaaaaaaaagaaaaaaga

SEQ ID NO: 10973 - DNA, 20 bp, synthetic construct
  misc_feature 1..20: note = Description of Artificial Sequence: Synthetic oligonucleotide
  misc_feature 1..20: note = Target: ANGPTL4; (+) strand; PAM type: NRG; PAM sequence: TGG
  source 1..20: mol_type = other DNA
aaaagaaagactcccttgcc

SEQ ID NO: 10974 - DNA, 20 bp, synthetic construct
  misc_feature 1..20: note = Description of Artificial Sequence: Synthetic oligonucleotide
  misc_feature 1..20: note = Target: ANGPTL4; (+) strand; PAM type: NRG; PAM sequence: CAG
  source 1..20: mol_type = other DNA
aagactcccttgcctggcct

SEQ ID NO: 10975 - DNA, 20 bp, synthetic construct
  misc_feature 1..20: note = Description of Artificial Sequence: Synthetic oligonucleotide
  misc_feature 1..20: note = Target: ANGPTL4; (+) strand; PAM type: NRG; PAM sequence: CGG
  source 1..20: mol_type = other DNA
actcccttgcctggcctcag

SEQ ID NO: 10976 - DNA, 20 bp, synthetic construct
  misc_feature 1..20: note = Description of Artificial Sequence: Synthetic oligonucleotide
  misc_feature 1..20: note = Target: ANGPTL4; (+) strand; PAM type: NRG; PAM sequence: TGG
  source 1..20: mol_type = other DNA
ccttgcctggcctcagcgga

SEQ ID NO: 10977 - DNA, 20 bp, synthetic construct
  misc_feature 1..20: note = Description of Artificial Sequence: Synthetic oligonucleotide
  misc_feature 1..20: note = Target: ANGPTL4; (+) strand; PAM type: NRG; PAM sequence: GAG
  source 1..20: mol_type = other DNA
ttgcctggcctcagcggatg

SEQ ID NO: 10978 - DNA, 20 bp, synthetic construct
  misc_feature 1..20: note = Description of Artificial Sequence: Synthetic oligonucleotide
  misc_feature 1..20: note = Target: ANGPTL4; (+) strand; PAM type: NRG; PAM sequence: TGG
  source 1..20: mol_type = other DNA
ggcctcagcggatggagatt

SEQ ID NO: 10979 - DNA, 20 bp, synthetic construct
  misc_feature 1..20: note = Description of Artificial Sequence: Synthetic oligonucleotide
  misc_feature 1..20: note = Target: ANGPTL4; (+) strand; PAM type: NRG; PAM sequence: AAG
  source 1..20: mol_type = other DNA
ctcagcggatggagatttgg

SEQ ID NO: 10980 - DNA, 20 bp, synthetic construct
  misc_feature 1..20: note = Description of Artificial Sequence: Synthetic oligonucleotide
  misc_feature 1..20: note = Target: ANGPTL4; (+) strand; PAM type: NRG; PAM sequence: AGG
  source 1..20: mol_type = other DNA
tcagcggatggagatttgga

SEQ ID NO: 10981 - DNA, 20 bp, synthetic construct
  misc_feature 1..20: note = Description of Artificial Sequence: Synthetic oligonucleotide
  misc_feature 1..20: note = Target: ANGPTL4; (+) strand; PAM type: NRG; PAM sequence: TGG
  source 1..20: mol_type = other DNA
cggatggagatttggaagga

SEQ ID NO: 10982 - DNA, 20 bp, synthetic construct
  misc_feature 1..20: note = Description of Artificial Sequence: Synthetic oligonucleotide
  misc_feature 1..20: note = Target: ANGPTL4; (+) strand; PAM type: NRG; PAM sequence: GAG
  source 1..20: mol_type = other DNA
ggagatttggaaggatggat

SEQ ID NO: 10983 - DNA, 20 bp, synthetic construct
  misc_feature 1..20: note = Description of Artificial Sequence: Synthetic oligonucleotide
  misc_feature 1..20: note = Target: ANGPTL4; (+) strand; PAM type: NRG; PAM sequence: TGG
  source 1..20: mol_type = other DNA
gatttggaaggatggatgag

SEQ ID NO: 10984 - DNA, 20 bp, synthetic construct
  misc_feature 1..20: note = Description of Artificial Sequence: Synthetic oligonucleotide
  misc_feature 1..20: note = Target: ANGPTL4; (+) strand; PAM type: NRG; PAM sequence: AAG
  source 1..20: mol_type = other DNA
gatggatgagtggatgaatt

SEQ ID NO: 10985 - DNA, 20 bp, synthetic construct
  misc_feature 1..20: note = Description of Artificial Sequence: Synthetic oligonucleotide
  misc_feature 1..20: note = Target: ANGPTL4; (+) strand; PAM type: NRG; PAM sequence: GAG
  source 1..20: mol_type = other DNA
tggatgagtggatgaattaa

SEQ ID NO: 10986 - DNA, 20 bp, synthetic construct
  misc_feature 1..20: note = Description of Artificial Sequence: Synthetic oligonucleotide
  misc_feature 1..20: note = Target: ANGPTL4; (+) strand; PAM type: NRG; PAM sequence: AGG
  source 1..20: mol_type = other DNA
ggatgagtggatgaattaag

SEQ ID NO: 10987 - DNA, 20 bp, synthetic construct
  misc_feature 1..20: note = Description of Artificial Sequence: Synthetic oligonucleotide
  misc_feature 1..20: note = Target: ANGPTL4; (+) strand; PAM type: NRG; PAM sequence: TGG
  source 1..20: mol_type = other DNA
gagtggatgaattaagaggt

SEQ ID NO: 10988 - DNA, 20 bp, synthetic construct
  misc_feature 1..20: note = Description of Artificial Sequence: Synthetic oligonucleotide
  misc_feature 1..20: note = Target: ANGPTL4; (+) strand; PAM type: NRG; PAM sequence: GGG
  source 1..20: mol_type = other DNA
agtggatgaattaagaggtt

SEQ ID NO: 10989 - DNA, 20 bp, synthetic construct
  misc_feature 1..20: note = Description of Artificial Sequence: Synthetic oligonucleotide
  misc_feature 1..20: note = Target: ANGPTL4; (+) strand; PAM type: NRG; PAM sequence: GGG
  source 1..20: mol_type = other DNA
gtggatgaattaagaggttg

SEQ ID NO: 10990 - DNA, 20 bp, synthetic construct
  misc_feature 1..20: note = Description of Artificial Sequence: Synthetic oligonucleotide
  misc_feature 1..20: note = Target: ANGPTL4; (+) strand; PAM type: NRG; PAM sequence: TAG
  source 1..20: mol_type = other DNA
gatgaattaagaggttgggg

SEQ ID NO: 10991 - DNA, 20 bp, synthetic construct
  misc_feature 1..20: note = Description of Artificial Sequence: Synthetic oligonucleotide
  misc_feature 1..20: note = Target: ANGPTL4; (+) strand; PAM type: NRG; PAM sequence: AGG
  source 1..20: mol_type = other DNA
atgaattaagaggttggggt

SEQ ID NO: 10992 - DNA, 20 bp, synthetic construct
  misc_feature 1..20: note = Description of Artificial Sequence: Synthetic oligonucleotide
  misc_feature 1..20: note = Target: ANGPTL4; (+) strand; PAM type: NRG; PAM sequence: AAG
  source 1..20: mol_type = other DNA
attaagaggttggggtaggc

SEQ ID NO: 10993 - DNA, 20 bp, synthetic construct
  misc_feature 1..20: note = Description of Artificial Sequence: Synthetic oligonucleotide
  misc_feature 1..20: note = Target: ANGPTL4; (+) strand; PAM type: NRG; PAM sequence: TGG
  source 1..20: mol_type = other DNA
agaggttggggtaggcaagc

SEQ ID NO: 10994 - DNA, 20 bp, synthetic construct
  misc_feature 1..20: note = Description of Artificial Sequence: Synthetic oligonucleotide
  misc_feature 1..20: note = Target: ANGPTL4; (+) strand; PAM type: NRG; PAM sequence: GGG
  source 1..20: mol_type = other DNA
gaggttggggtaggcaagct

SEQ ID NO: 10995 - DNA, 20 bp, synthetic construct
  misc_feature 1..20: note = Description of Artificial Sequence: Synthetic oligonucleotide
  misc_feature 1..20: note = Target: ANGPTL4; (+) strand; PAM type: NRG; PAM sequence: AAG
  source 1..20: mol_type = other DNA
aggcaagctgggtcctcacc

SEQ ID NO: 10996 - DNA, 20 bp, synthetic construct
  misc_feature 1..20: note = Description of Artificial Sequence: Synthetic oligonucleotide
  misc_feature 1..20: note = Target: ANGPTL4; (+) strand; PAM type: NRG; PAM sequence: AGG
  source 1..20: mol_type = other DNA
ggcaagctgggtcctcacca

SEQ ID NO: 10997 - DNA, 20 bp, synthetic construct
  misc_feature 1..20: note = Description of Artificial Sequence: Synthetic oligonucleotide
  misc_feature 1..20: note = Target: ANGPTL4; (+) strand; PAM type: NRG; PAM sequence: CAG
  source 1..20: mol_type = other DNA
ccaaggttttcacccctccc

SEQ ID NO: 10998 - DNA, 20 bp, synthetic construct
  misc_feature 1..20: note = Description of Artificial Sequence: Synthetic oligonucleotide
  misc_feature 1..20: note = Target: ANGPTL4; (+) strand; PAM type: NRG; PAM sequence: AAG
  source 1..20: mol_type = other DNA
cccctccccagacacaactc

SEQ ID NO: 10999 - DNA, 20 bp, synthetic construct
  misc_feature 1..20: note = Description of Artificial Sequence: Synthetic oligonucleotide
  misc_feature 1..20: note = Target: ANGPTL4; (+) strand; PAM type: NRG; PAM sequence: AGG
  source 1..20: mol_type = other DNA
ccctccccagacacaactca

SEQ ID NO: 11000 - DNA, 20 bp, synthetic construct
  misc_feature 1..20: note = Description of Artificial Sequence: Synthetic oligonucleotide
  misc_feature 1..20: note = Target: ANGPTL4; (+) strand; PAM type: NRG; PAM sequence: CAG
  source 1..20: mol_type = other DNA
cccagacacaactcaaggct

SEQ ID NO: 11001 - DNA, 20 bp, synthetic construct
  misc_feature 1..20: note = Description of Artificial Sequence: Synthetic oligonucleotide
  misc_feature 1..20: note = Target: ANGPTL4; (+) strand; PAM type: NRG; PAM sequence: CAG
  source 1..20: mol_type = other DNA
acacaactcaaggctcagaa

SEQ ID NO: 11002 - DNA, 20 bp, synthetic construct
  misc_feature 1..20: note = Description of Artificial Sequence: Synthetic oligonucleotide
  misc_feature 1..20: note = Target: ANGPTL4; (+) strand; PAM type: NRG; PAM sequence: CAG
  source 1..20: mol_type = other DNA
caactcaaggctcagaacag

SEQ ID NO: 11003 - DNA, 20 bp, synthetic construct
  misc_feature 1..20: note = Description of Artificial Sequence: Synthetic oligonucleotide
  misc_feature 1..20: note = Target: ANGPTL4; (+) strand; PAM type: NRG; PAM sequence: AGG
  source 1..20: mol_type = other DNA
aactcaaggctcagaacagc

SEQ ID NO: 11004 - DNA, 20 bp, synthetic construct
  misc_feature 1..20: note = Description of Artificial Sequence: Synthetic oligonucleotide
  misc_feature 1..20: note = Target: ANGPTL4; (+) strand; PAM type: NRG; PAM sequence: CAG
  source 1..20: mol_type = other DNA
aggctcagaacagcaggatc

SEQ ID NO: 11005 - DNA, 20 bp, synthetic construct
  misc_feature 1..20: note = Description of Artificial Sequence: Synthetic oligonucleotide
  misc_feature 1..20: note = Target: ANGPTL4; (+) strand; PAM type: NRG; PAM sequence: AAG
  source 1..20: mol_type = other DNA
ggatccagcaactcttccac

SEQ ID NO: 11006 - DNA, 20 bp, synthetic construct
  misc_feature 1..20: note = Description of Artificial Sequence: Synthetic oligonucleotide
  misc_feature 1..20: note = Target: ANGPTL4; (+) strand; PAM type: NRG; PAM sequence: AGG
  source 1..20: mol_type = other DNA
gatccagcaactcttccaca

SEQ ID NO: 11007 - DNA, 20 bp, synthetic construct
  misc_feature 1..20: note = Description of Artificial Sequence: Synthetic oligonucleotide
  misc_feature 1..20: note = Target: ANGPTL4; (+) strand; PAM type: NRG; PAM sequence: TGG
  source 1..20: mol_type = other DNA
ccagcaactcttccacaagg

SEQ ID NO: 11008 - DNA, 20 bp, synthetic construct
  misc_feature 1..20: note = Description of Artificial Sequence: Synthetic oligonucleotide
  misc_feature 1..20: note = Target: ANGPTL4; (+) strand; PAM type: NRG; PAM sequence: CAG
  source 1..20: mol_type = other DNA
aactcttccacaaggtggcc

SEQ ID NO: 11009 - DNA, 20 bp, synthetic construct
  misc_feature 1..20: note = Description of Artificial Sequence: Synthetic oligonucleotide
  misc_feature 1..20: note = Target: ANGPTL4; (+) strand; PAM type: NRG; PAM sequence: CAG
  source 1..20: mol_type = other DNA
tcttccacaaggtggcccag

SEQ ID NO: 11010 - DNA, 20 bp, synthetic construct
  misc_feature 1..20: note = Description of Artificial Sequence: Synthetic oligonucleotide
  misc_feature 1..20: note = Target: ANGPTL4; (+) strand; PAM type: NRG; PAM sequence: CAG
  source 1..20: mol_type = other DNA
tccacaaggtggcccagcag

SEQ ID NO: 11011 - DNA, 20 bp, synthetic construct
  misc_feature 1..20: note = Description of Artificial Sequence: Synthetic oligonucleotide
  misc_feature 1..20: note = Target: ANGPTL4; (+) strand; PAM type: NRG; PAM sequence: CGG
  source 1..20: mol_type = other DNA
acaaggtggcccagcagcag

SEQ ID NO: 11012 - DNA, 20 bp, synthetic construct
  misc_feature 1..20: note = Description of Artificial Sequence: Synthetic oligonucleotide
  misc_feature 1..20: note = Target: ANGPTL4; (+) strand; PAM type: NRG; PAM sequence: TGG
  source 1..20: mol_type = other DNA
ggcccagcagcagcggcacc

SEQ ID NO: 11013 - DNA, 20 bp, synthetic construct
  misc_feature 1..20: note = Description of Artificial Sequence: Synthetic oligonucleotide
  misc_feature 1..20: note = Target: ANGPTL4; (+) strand; PAM type: NRG; PAM sequence: GAG
  source 1..20: mol_type = other DNA
cccagcagcagcggcacctg

SEQ ID NO: 11014 - DNA, 20 bp, synthetic construct
  misc_feature 1..20: note = Description of Artificial Sequence: Synthetic oligonucleotide
  misc_feature 1..20: note = Target: ANGPTL4; (+) strand; PAM type: NRG; PAM sequence: AAG
  source 1..20: mol_type = other DNA
agcagcagcggcacctggag

SEQ ID NO: 11015 - DNA, 20 bp, synthetic construct
  misc_feature 1..20: note = Description of Artificial Sequence: Synthetic oligonucleotide
  misc_feature 1..20: note = Target: ANGPTL4; (+) strand; PAM type: NRG; PAM sequence: CAG
  source 1..20: mol_type = other DNA
agcagcggcacctggagaag

SEQ ID NO: 11016 - DNA, 20 bp, synthetic construct
  misc_feature 1..20: note = Description of Artificial Sequence: Synthetic oligonucleotide
  misc_feature 1..20: note = Target: ANGPTL4; (+) strand; PAM type: NRG; PAM sequence: CAG
  source 1..20: mol_type = other DNA
agaagcagcacctgcgaatt

SEQ ID NO: 11017 - DNA, 20 bp, synthetic construct
  misc_feature 1..20: note = Description of Artificial Sequence: Synthetic oligonucleotide
  misc_feature 1..20: note = Target: ANGPTL4; (+) strand; PAM type: NRG; PAM sequence: AAG
  source 1..20: mol_type = other DNA
ctgcgaattcagcatctgca

SEQ ID NO: 11018 - DNA, 20 bp, synthetic construct
  misc_feature 1..20: note = Description of Artificial Sequence: Synthetic oligonucleotide
  misc_feature 1..20: note = Target: ANGPTL4; (+) strand; PAM type: NRG; PAM sequence: CAG
  source 1..20: mol_type = other DNA
gaattcagcatctgcaaagc

SEQ ID NO: 11019 - DNA, 20 bp, synthetic construct
  misc_feature 1..20: note = Description of Artificial Sequence: Synthetic oligonucleotide
  misc_feature 1..20: note = Target: ANGPTL4; (+) strand; PAM type: NRG; PAM sequence: AGG
  source 1..20: mol_type = other DNA
aattcagcatctgcaaagcc

SEQ ID NO: 11020 - DNA, 20 bp, synthetic construct
  misc_feature 1..20: note = Description of Artificial Sequence: Synthetic oligonucleotide
  misc_feature 1..20: note = Target: ANGPTL4; (+) strand; PAM type: NRG; PAM sequence: TAG
  source 1..20: mol_type = other DNA
tctgcaaagccaggtaaccc

SEQ ID NO: 11021 - DNA, 20 bp, synthetic construct
  misc_feature 1..20: note = Description of Artificial Sequence: Synthetic oligonucleotide
  misc_feature 1..20: note = Target: ANGPTL4; (+) strand; PAM type: NRG; PAM sequence: AGG
  source 1..20: mol_type = other DNA
ctgcaaagccaggtaaccct

SEQ ID NO: 11022 - DNA, 20 bp, synthetic construct
  misc_feature 1..20: note = Description of Artificial Sequence: Synthetic oligonucleotide
  misc_feature 1..20: note = Target: ANGPTL4; (+) strand; PAM type: NRG; PAM sequence: AAG
  source 1..20: mol_type = other DNA
agccaggtaaccctaggatc

SEQ ID NO: 11023 - DNA, 20 bp, synthetic construct
  misc_feature 1..20: note = Description of Artificial Sequence: Synthetic oligonucleotide
  misc_feature 1..20: note = Target: ANGPTL4; (+) strand; PAM type: NRG; PAM sequence: AGG
  source 1..20: mol_type = other DNA
gccaggtaaccctaggatca

SEQ ID NO: 11024 - DNA, 20 bp, synthetic construct
  misc_feature 1..20: note = Description of Artificial Sequence: Synthetic oligonucleotide
  misc_feature 1..20: note = Target: ANGPTL4; (+) strand; PAM type: NRG; PAM sequence: GGG
  source 1..20: mol_type = other DNA
ccaggtaaccctaggatcaa

SEQ ID NO: 11025 - DNA, 20 bp, synthetic construct
  misc_feature 1..20: note = Description of Artificial Sequence: Synthetic oligonucleotide
  misc_feature 1..20: note = Target: ANGPTL4; (+) strand; PAM type: NRG; PAM sequence: GAG
  source 1..20: mol_type = other DNA
aggtaaccctaggatcaagg

SEQ ID NO: 11026 - DNA, 20 bp, synthetic construct
  misc_feature 1..20: note = Description of Artificial Sequence: Synthetic oligonucleotide
  misc_feature 1..20: note = Target: ANGPTL4; (+) strand; PAM type: NRG; PAM sequence: AAG
  source 1..20: mol_type = other DNA
accctaggatcaagggagaa

SEQ ID NO: 11027 - DNA, 20 bp, synthetic construct
  misc_feature 1..20: note = Description of Artificial Sequence: Synthetic oligonucleotide
  misc_feature 1..20: note = Target: ANGPTL4; (+) strand; PAM type: NRG; PAM sequence: AGG
  source 1..20: mol_type = other DNA
ccctaggatcaagggagaaa

SEQ ID NO: 11028 - DNA, 20 bp, synthetic construct
  misc_feature 1..20: note = Description of Artificial Sequence: Synthetic oligonucleotide
  misc_feature 1..20: note = Target: ANGPTL4; (+) strand; PAM type: NRG; PAM sequence: TAG
  source 1..20: mol_type = other DNA
gggagaaaaggtccctctga

SEQ ID NO: 11029 - DNA, 20 bp, synthetic construct
  misc_feature 1..20: note = Description of Artificial Sequence: Synthetic oligonucleotide
  misc_feature 1..20: note = Target: ANGPTL4; (+) strand; PAM type: NRG; PAM sequence: TGG
  source 1..20: mol_type = other DNA
gaaaaggtccctctgatagc

SEQ ID NO: 11030 - DNA, 20 bp, synthetic construct
  misc_feature 1..20: note = Description of Artificial Sequence: Synthetic oligonucleotide
  misc_feature 1..20: note = Target: ANGPTL4; (+) strand; PAM type: NRG; PAM sequence: CAG
  source 1..20: mol_type = other DNA
tccctctgatagctggaccc

SEQ ID NO: 11031 - DNA, 20 bp, synthetic construct
  misc_feature 1..20: note = Description of Artificial Sequence: Synthetic oligonucleotide
  misc_feature 1..20: note = Target: ANGPTL4; (+) strand; PAM type: NRG; PAM sequence: AGG
  source 1..20: mol_type = other DNA
ccctctgatagctggacccc

SEQ ID NO: 11032 - DNA, 20 bp, synthetic construct
  misc_feature 1..20: note = Description of Artificial Sequence: Synthetic oligonucleotide
  misc_feature 1..20: note = Target: ANGPTL4; (+) strand; PAM type: NRG; PAM sequence: GAG
  source 1..20: mol_type = other DNA
tgatagctggaccccaggtt

SEQ ID NO: 11033 - DNA, 20 bp, synthetic construct
  misc_feature 1..20: note = Description of Artificial Sequence: Synthetic oligonucleotide
  misc_feature 1..20: note = Target: ANGPTL4; (+) strand; PAM type: NRG; PAM sequence: GAG
  source 1..20: mol_type = other DNA
atagctggaccccaggttga

SEQ ID NO: 11034 - DNA, 20 bp, synthetic construct
  misc_feature 1..20: note = Description of Artificial Sequence: Synthetic oligonucleotide
  misc_feature 1..20: note = Target: ANGPTL4; (+) strand; PAM type: NRG; PAM sequence: AGG
  source 1..20: mol_type = other DNA
tagctggaccccaggttgag

SEQ ID NO: 11035 - DNA, 20 bp, synthetic construct
  misc_feature 1..20: note = Description of Artificial Sequence: Synthetic oligonucleotide
  misc_feature 1..20: note = Target: ANGPTL4; (+) strand; PAM type: NRG; PAM sequence: GGG
  source 1..20: mol_type = other DNA
agctggaccccaggttgaga

SEQ ID NO: 11036 - DNA, 20 bp, synthetic construct
  misc_feature 1..20: note = Description of Artificial Sequence: Synthetic oligonucleotide
  misc_feature 1..20: note = Target: ANGPTL4; (+) strand; PAM type: NRG; PAM sequence: GAG
  source 1..20: mol_type = other DNA
ctggaccccaggttgagagg

SEQ ID NO: 11037 - DNA, 20 bp, synthetic construct
  misc_feature 1..20: note = Description of Artificial Sequence: Synthetic oligonucleotide
  misc_feature 1..20: note = Target: ANGPTL4; (+) strand; PAM type: NRG; PAM sequence: AGG
  source 1..20: mol_type = other DNA
tggaccccaggttgagaggg

SEQ ID NO: 11038 - DNA, 20 bp, synthetic construct
  misc_feature 1..20: note = Description of Artificial Sequence: Synthetic oligonucleotide
  misc_feature 1..20: note = Target: ANGPTL4; (+) strand; PAM type: NRG; PAM sequence: TGG
  source 1..20: mol_type = other DNA
accccaggttgagagggagg

SEQ ID NO: 11039 - DNA, 20 bp, synthetic construct
  misc_feature 1..20: note = Description of Artificial Sequence: Synthetic oligonucleotide
  misc_feature 1..20: note = Target: ANGPTL4; (+) strand; PAM type: NRG; PAM sequence: GAG
  source 1..20: mol_type = other DNA
caggttgagagggaggtggt

SEQ ID NO: 11040 - DNA, 20 bp, synthetic construct
  misc_feature 1..20: note = Description of Artificial Sequence: Synthetic oligonucleotide
  misc_feature 1..20: note = Target: ANGPTL4; (+) strand; PAM type: NRG; PAM sequence: TGG
  source 1..20: mol_type = other DNA
gagagggaggtggtgagaac

SEQ ID NO: 11041 - DNA, 20 bp, synthetic construct
  misc_feature 1..20: note = Description of Artificial Sequence: Synthetic oligonucleotide
  misc_feature 1..20: note = Target: ANGPTL4; (+) strand; PAM type: NRG; PAM sequence: TGG
  source 1..20: mol_type = other DNA
ggtggtgagaactggacgtg

SEQ ID NO: 11042 - DNA, 20 bp, synthetic construct
  misc_feature 1..20: note = Description of Artificial Sequence: Synthetic oligonucleotide
  misc_feature 1..20: note = Target: ANGPTL4; (+) strand; PAM type: NRG; PAM sequence: TGG
  source 1..20: mol_type = other DNA
gtgagaactggacgtgtggc

SEQ ID NO: 11043 - DNA, 20 bp, synthetic construct
  misc_feature 1..20: note = Description of Artificial Sequence: Synthetic oligonucleotide
  misc_feature 1..20: note = Target: ANGPTL4; (+) strand; PAM type: NRG; PAM sequence: GGG
  source 1..20: mol_type = other DNA
tgagaactggacgtgtggct

SEQ ID NO: 11044 - DNA, 20 bp, synthetic construct
  misc_feature 1..20: note = Description of Artificial Sequence: Synthetic oligonucleotide
  misc_feature 1..20: note = Target: ANGPTL4; (+) strand; PAM type: NRG; PAM sequence: GGG
  source 1..20: mol_type = other DNA
gagaactggacgtgtggctg

SEQ ID NO: 11045 - DNA, 20 bp, synthetic construct
  misc_feature 1..20: note = Description of Artificial Sequence: Synthetic oligonucleotide
  misc_feature 1..20: note = Target: ANGPTL4; (+) strand; PAM type: NRG; PAM sequence: TGG
  source 1..20: mol_type = other DNA
tggacgtgtggctggggacg

SEQ ID NO: 11046 - DNA, 20 bp, synthetic construct
  misc_feature 1..20: note = Description of Artificial Sequence: Synthetic oligonucleotide
  misc_feature 1..20: note = Target: ANGPTL4; (+) strand; PAM type: NRG; PAM sequence: GGG
  source 1..20: mol_type = other DNA
ggacgtgtggctggggacgt

SEQ ID NO: 11047 - DNA, 20 bp, synthetic construct
  misc_feature 1..20: note = Description of Artificial Sequence: Synthetic oligonucleotide
  misc_feature 1..20: note = Target: ANGPTL4; (+) strand; PAM type: NRG; PAM sequence: GGG
  source 1..20: mol_type = other DNA
gacgtgtggctggggacgtg

SEQ ID NO: 11048 - DNA, 20 bp, synthetic construct
  misc_feature 1..20: note = Description of Artificial Sequence: Synthetic oligonucleotide
  misc_feature 1..20: note = Target: ANGPTL4; (+) strand; PAM type: NRG; PAM sequence: CAG
  source 1..20: mol_type = other DNA
tgtggctggggacgtggggc

SEQ ID NO: 11049 - DNA, 20 bp, synthetic construct
  misc_feature 1..20: note = Description of Artificial Sequence: Synthetic oligonucleotide
  misc_feature 1..20: note = Target: ANGPTL4; (+) strand; PAM type: NRG; PAM sequence: AGG
  source 1..20: mol_type = other DNA
gtggctggggacgtggggcc

SEQ ID NO: 11050 - DNA, 20 bp, synthetic construct
  misc_feature 1..20: note = Description of Artificial Sequence: Synthetic oligonucleotide
  misc_feature 1..20: note = Target: ANGPTL4; (+) strand; PAM type: NRG; PAM sequence: CAG
  source 1..20: mol_type = other DNA
gctggggacgtggggccagg

SEQ ID NO: 11051 - DNA, 20 bp, synthetic construct
  misc_feature 1..20: note = Description of Artificial Sequence: Synthetic oligonucleotide
  misc_feature 1..20: note = Target: ANGPTL4; (+) strand; PAM type: NRG; PAM sequence: AGG
  source 1..20: mol_type = other DNA
ctggggacgtggggccaggc

SEQ ID NO: 11052 - DNA, 20 bp, synthetic construct
  misc_feature 1..20: note = Description of Artificial Sequence: Synthetic oligonucleotide
  misc_feature 1..20: note = Target: ANGPTL4; (+) strand; PAM type: NRG; PAM sequence: TAG
  source 1..20: mol_type = other DNA
accctcctcccgtcccatcc

SEQ ID NO: 11053 - DNA, 20 bp, synthetic construct
  misc_feature 1..20: note = Description of Artificial Sequence: Synthetic oligonucleotide
  misc_feature 1..20: note = Target: ANGPTL4; (+) strand; PAM type: NRG; PAM sequence: TGG
  source 1..20: mol_type = other DNA
cctcccgtcccatcctagtt

SEQ ID NO: 11054 - DNA, 20 bp, synthetic construct
  misc_feature 1..20: note = Description of Artificial Sequence: Synthetic oligonucleotide
  misc_feature 1..20: note = Target: ANGPTL4; (+) strand; PAM type: NRG; PAM sequence: TGG
  source 1..20: mol_type = other DNA
cccatcctagtttggcctcc

SEQ ID NO: 11055 - DNA, 20 bp, synthetic construct
  misc_feature 1..20: note = Description of Artificial Sequence: Synthetic oligonucleotide
  misc_feature 1..20: note = Target: ANGPTL4; (+) strand; PAM type: NRG; PAM sequence: AAG
  source 1..20: mol_type = other DNA
agtttggcctcctggaccac

SEQ ID NO: 11056 - DNA, 20 bp, synthetic construct
  misc_feature 1..20: note = Description of Artificial Sequence: Synthetic oligonucleotide
  misc_feature 1..20: note = Target: ANGPTL4; (+) strand; PAM type: NRG; PAM sequence: TAG
  source 1..20: mol_type = other DNA
cctcctggaccacaagcacc

SEQ ID NO: 11057 - DNA, 20 bp, synthetic construct
  misc_feature 1..20: note = Description of Artificial Sequence: Synthetic oligonucleotide
  misc_feature 1..20: note = Target: ANGPTL4; (+) strand; PAM type: NRG; PAM sequence: GAG
  source 1..20: mol_type = other DNA
accacaagcacctagaccat

SEQ ID NO: 11058 - DNA, 20 bp, synthetic construct
  misc_feature 1..20: note = Description of Artificial Sequence: Synthetic oligonucleotide
  misc_feature 1..20: note = Target: ANGPTL4; (+) strand; PAM type: NRG; PAM sequence: AGG
  source 1..20: mol_type = other DNA
ccacaagcacctagaccatg

SEQ ID NO: 11059 - DNA, 20 bp, synthetic construct
  misc_feature 1..20: note = Description of Artificial Sequence: Synthetic oligonucleotide
  misc_feature 1..20: note = Target: ANGPTL4; (+) strand; PAM type: NRG; PAM sequence: TGG
  source 1..20: mol_type = other DNA
caagcacctagaccatgagg

SEQ ID NO: 11060 - DNA, 20 bp, synthetic construct
  misc_feature 1..20: note = Description of Artificial Sequence: Synthetic oligonucleotide
  misc_feature 1..20: note = Target: ANGPTL4; (+) strand; PAM type: NRG; PAM sequence: AAG
  source 1..20: mol_type = other DNA
acctagaccatgaggtggcc

SEQ ID NO: 11061 - DNA, 20 bp, synthetic construct
  misc_feature 1..20: note = Description of Artificial Sequence: Synthetic oligonucleotide
  misc_feature 1..20: note = Target: ANGPTL4; (+) strand; PAM type: NRG; PAM sequence: AAG
  source 1..20: mol_type = other DNA
gaggtggccaagcctgcccg

SEQ ID NO: 11062 - DNA, 20 bp, synthetic construct
  misc_feature 1..20: note = Description of Artificial Sequence: Synthetic oligonucleotide
  misc_feature 1..20: note = Target: ANGPTL4; (+) strand; PAM type: NRG; PAM sequence: AAG
  source 1..20: mol_type = other DNA
tggccaagcctgcccgaaga

SEQ ID NO: 11063 - DNA, 20 bp, synthetic construct
  misc_feature 1..20: note = Description of Artificial Sequence: Synthetic oligonucleotide
  misc_feature 1..20: note = Target: ANGPTL4; (+) strand; PAM type: NRG; PAM sequence: GAG
  source 1..20: mol_type = other DNA
gccaagcctgcccgaagaaa

SEQ ID NO: 11064 - DNA, 20 bp, synthetic construct
  misc_feature 1..20: note = Description of Artificial Sequence: Synthetic oligonucleotide
  misc_feature 1..20: note = Target: ANGPTL4; (+) strand; PAM type: NRG; PAM sequence: AGG
  source 1..20: mol_type = other DNA
ccaagcctgcccgaagaaag

SEQ ID NO: 11065 - DNA, 20 bp, synthetic construct
  misc_feature 1..20: note = Description of Artificial Sequence: Synthetic oligonucleotide
  misc_feature 1..20: note = Target: ANGPTL4; (+) strand; PAM type: NRG; PAM sequence: GAG
  source 1..20: mol_type = other DNA
cccgaagaaagaggctgccc

SEQ ID NO: 11066 - DNA, 20 bp, synthetic construct
  misc_feature 1..20: note = Description of Artificial Sequence: Synthetic oligonucleotide
  misc_feature 1..20: note = Target: ANGPTL4; (+) strand; PAM type: NRG; PAM sequence: TGG
  source 1..20: mol_type = other DNA
aagaaagaggctgcccgaga

SEQ ID NO: 11067 - DNA, 20 bp, synthetic construct
  misc_feature 1..20: note = Description of Artificial Sequence: Synthetic oligonucleotide
  misc_feature 1..20: note = Target: ANGPTL4; (+) strand; PAM type: NRG; PAM sequence: CAG
  source 1..20: mol_type = other DNA
agaggctgcccgagatggcc

SEQ ID NO: 11068 - DNA, 20 bp, synthetic construct
  misc_feature 1..20: note = Description of Artificial Sequence: Synthetic oligonucleotide
  misc_feature 1..20: note = Target: ANGPTL4; (+) strand; PAM type: NRG; PAM sequence: CAG
  source 1..20: mol_type = other DNA
gctgcccgagatggcccagc

SEQ ID NO: 11069 - DNA, 20 bp, synthetic construct
  misc_feature 1..20: note = Description of Artificial Sequence: Synthetic oligonucleotide
  misc_feature 1..20: note = Target: ANGPTL4; (+) strand; PAM type: NRG; PAM sequence: CGG
  source 1..20: mol_type = other DNA
gatggcccagccagttgacc

SEQ ID NO: 11070 - DNA, 20 bp, synthetic construct
  misc_feature 1..20: note = Description of Artificial Sequence: Synthetic oligonucleotide
  misc_feature 1..20: note = Target: ANGPTL4; (+) strand; PAM type: NRG; PAM sequence: CAG
  source 1..20: mol_type = other DNA
gttgacccggctcacaatgt

SEQ ID NO: 11071 - DNA, 20 bp, synthetic construct
  misc_feature 1..20: note = Description of Artificial Sequence: Synthetic oligonucleotide
  misc_feature 1..20: note = Target: ANGPTL4; (+) strand; PAM type: NRG; PAM sequence: GAG
  source 1..20: mol_type = other DNA
atgtcagccgcctgcaccgt

SEQ ID NO: 11072 - DNA, 20 bp, synthetic construct
  misc_feature 1..20: note = Description of Artificial Sequence: Synthetic oligonucleotide
  misc_feature 1..20: note = Target: ANGPTL4; (+) strand; PAM type: NRG; PAM sequence: CGG
  source 1..20: mol_type = other DNA
gtctgcccctcgatgctctc

SEQ ID NO: 11073 - DNA, 20 bp, synthetic construct
  misc_feature 1..20: note = Description of Artificial Sequence: Synthetic oligonucleotide
  misc_feature 1..20: note = Target: ANGPTL4; (+) strand; PAM type: NRG; PAM sequence: TGG
  source 1..20: mol_type = other DNA
tgcccctcgatgctctccgg

SEQ ID NO: 11074 - DNA, 20 bp, synthetic construct
  misc_feature 1..20: note = Description of Artificial Sequence: Synthetic oligonucleotide
  misc_feature 1..20: note = Target: ANGPTL4; (+) strand; PAM type: NRG; PAM sequence: TGG
  source 1..20: mol_type = other DNA
accccgccacttgccattgc

SEQ ID NO: 11075 - DNA, 20 bp, synthetic construct
  misc_feature 1..20: note = Description of Artificial Sequence: Synthetic oligonucleotide
  misc_feature 1..20: note = Target: ANGPTL4; (+) strand; PAM type: NRG; PAM sequence: CAG
  source 1..20: mol_type = other DNA
attgctggtcctctccttgt

SEQ ID NO: 11076 - DNA, 20 bp, synthetic construct
  misc_feature 1..20: note = Description of Artificial Sequence: Synthetic oligonucleotide
  misc_feature 1..20: note = Target: ANGPTL4; (+) strand; PAM type: NRG; PAM sequence: AGG
  source 1..20: mol_type = other DNA
ttgctggtcctctccttgtc

SEQ ID NO: 11077 - DNA, 20 bp, synthetic construct
  misc_feature 1..20: note = Description of Artificial Sequence: Synthetic oligonucleotide
  misc_feature 1..20: note = Target: ANGPTL4; (+) strand; PAM type: NRG; PAM sequence: AAG
  source 1..20: mol_type = other DNA
ctccttgtcaggtccacctt

SEQ ID NO: 11078 - DNA, 20 bp, synthetic construct
  misc_feature 1..20: note = Description of Artificial Sequence: Synthetic oligonucleotide
  misc_feature 1..20: note = Target: ANGPTL4; (+) strand; PAM type: NRG; PAM sequence: AGG
  source 1..20: mol_type = other DNA
tccttgtcaggtccacctta

SEQ ID NO: 11079 - DNA, 20 bp, synthetic construct
  misc_feature 1..20: note = Description of Artificial Sequence: Synthetic oligonucleotide
  misc_feature 1..20: note = Target: ANGPTL4; (+) strand; PAM type: NRG; PAM sequence: GAG
  source 1..20: mol_type = other DNA
cttgtcaggtccaccttaag

SEQ ID NO: 11080 - DNA, 20 bp, synthetic construct
  misc_feature 1..20: note = Description of Artificial Sequence: Synthetic oligonucleotide
  misc_feature 1..20: note = Target: ANGPTL4; (+) strand; PAM type: NRG; PAM sequence: AAG
  source 1..20: mol_type = other DNA
gtcaggtccaccttaaggag

SEQ ID NO: 11081 - DNA, 20 bp, synthetic construct
  misc_feature 1..20: note = Description of Artificial Sequence: Synthetic oligonucleotide
  misc_feature 1..20: note = Target: ANGPTL4; (+) strand; PAM type: NRG; PAM sequence: TGG
  source 1..20: mol_type = other DNA
accttaaggagaagatgtcc

SEQ ID NO: 11082 - DNA, 20 bp, synthetic construct
  misc_feature 1..20: note = Description of Artificial Sequence: Synthetic oligonucleotide
  misc_feature 1..20: note = Target: ANGPTL4; (+) strand; PAM type: NRG; PAM sequence: TGG
  source 1..20: mol_type = other DNA
aaggagaagatgtcctggcc

SEQ ID NO: 11083 - DNA, 20 bp, synthetic construct
  misc_feature 1..20: note = Description of Artificial Sequence: Synthetic oligonucleotide
  misc_feature 1..20: note = Target: ANGPTL4; (+) strand; PAM type: NRG; PAM sequence: GAG
  source 1..20: mol_type = other DNA
ggagaagatgtcctggcctg

SEQ ID NO: 11084 - DNA, 20 bp, synthetic construct
  misc_feature 1..20: note = Description of Artificial Sequence: Synthetic oligonucleotide
  misc_feature 1..20: note = Target: ANGPTL4; (+) strand; PAM type: NRG; PAM sequence: GAG
  source 1..20: mol_type = other DNA
tgtcctggcctggagtccct

SEQ ID NO: 11085 - DNA, 20 bp, synthetic construct
  misc_feature 1..20: note = Description of Artificial Sequence: Synthetic oligonucleotide
  misc_feature 1..20: note = Target: ANGPTL4; (+) strand; PAM type: NRG; PAM sequence: AGG
  source 1..20: mol_type = other DNA
gtcctggcctggagtccctg

SEQ ID NO: 11086 - DNA, 20 bp, synthetic construct
  misc_feature 1..20: note = Description of Artificial Sequence: Synthetic oligonucleotide
  misc_feature 1..20: note = Target: ANGPTL4; (+) strand; PAM type: NRG; PAM sequence: GGG
  source 1..20: mol_type = other DNA
tcctggcctggagtccctga

SEQ ID NO: 11087 - DNA, 20 bp, synthetic construct
  misc_feature 1..20: note = Description of Artificial Sequence: Synthetic oligonucleotide
  misc_feature 1..20: note = Target: ANGPTL4; (+) strand; PAM type: NRG; PAM sequence: CAG
  source 1..20: mol_type = other DNA
tggagtccctgagggctcac

SEQ ID NO: 11088 - DNA, 20 bp, synthetic construct
  misc_feature 1..20: note = Description of Artificial Sequence: Synthetic oligonucleotide
  misc_feature 1..20: note = Target: ANGPTL4; (+) strand; PAM type: NRG; PAM sequence: TGG
  source 1..20: mol_type = other DNA
cctgagggctcaccagtctc

SEQ ID NO: 11089 - DNA, 20 bp, synthetic construct
  misc_feature 1..20: note = Description of Artificial Sequence: Synthetic oligonucleotide
  misc_feature 1..20: note = Target: ANGPTL4; (+) strand; PAM type: NRG; PAM sequence: GGG
  source 1..20: mol_type = other DNA
ctgagggctcaccagtctct

SEQ ID NO: 11090 - DNA, 20 bp, synthetic construct
  misc_feature 1..20: note = Description of Artificial Sequence: Synthetic oligonucleotide
  misc_feature 1..20: note = Target: ANGPTL4; (+) strand; PAM type: NRG; PAM sequence: AAG
  source 1..20: mol_type = other DNA
gctcaccagtctctgggtca

SEQ ID NO: 11091 - DNA, 20 bp, synthetic construct
  misc_feature 1..20: note = Description of Artificial Sequence: Synthetic oligonucleotide
  misc_feature 1..20: note = Target: ANGPTL4; (+) strand; PAM type: NRG; PAM sequence: TGG
  source 1..20: mol_type = other DNA
agtctctgggtcaaagctga

SEQ ID NO: 11092 - DNA, 20 bp, synthetic construct
  misc_feature 1..20: note = Description of Artificial Sequence: Synthetic oligonucleotide
  misc_feature 1..20: note = Target: ANGPTL4; (+) strand; PAM type: NRG; PAM sequence: GGG
  source 1..20: mol_type = other DNA
gtctctgggtcaaagctgat

SEQ ID NO: 11093 - DNA, 20 bp, synthetic construct
  misc_feature 1..20: note = Description of Artificial Sequence: Synthetic oligonucleotide
  misc_feature 1..20: note = Target: ANGPTL4; (+) strand; PAM type: NRG; PAM sequence: GAG
  source 1..20: mol_type = other DNA
ctctgggtcaaagctgatgg

SEQ ID NO: 11094 - DNA, 20 bp, synthetic construct
  misc_feature 1..20: note = Description of Artificial Sequence: Synthetic oligonucleotide
  misc_feature 1..20: note = Target: ANGPTL4; (+) strand; PAM type: NRG; PAM sequence: CAG
  source 1..20: mol_type = other DNA
gatgggagcacctccttcct

SEQ ID NO: 11095 - DNA, 20 bp, synthetic construct
  misc_feature 1..20: note = Description of Artificial Sequence: Synthetic oligonucleotide
  misc_feature 1..20: note = Target: ANGPTL4; (+) strand; PAM type: NRG; PAM sequence: TGG
  source 1..20: mol_type = other DNA
ctccttcctcagccctgacc

SEQ ID NO: 11096 - DNA, 20 bp, synthetic construct
  misc_feature 1..20: note = Description of Artificial Sequence: Synthetic oligonucleotide
  misc_feature 1..20: note = Target: ANGPTL4; (+) strand; PAM type: NRG; PAM sequence: CAG
  source 1..20: mol_type = other DNA
tcctcagccctgacctggcc

SEQ ID NO: 11097 - DNA, 20 bp, synthetic construct
  misc_feature 1..20: note = Description of Artificial Sequence: Synthetic oligonucleotide
  misc_feature 1..20: note = Target: ANGPTL4; (+) strand; PAM type: NRG; PAM sequence: CAG
  source 1..20: mol_type = other DNA
cagccctgacctggcccagc

SEQ ID NO: 11098 - DNA, 20 bp, synthetic construct
  misc_feature 1..20: note = Description of Artificial Sequence: Synthetic oligonucleotide
  misc_feature 1..20: note = Target: ANGPTL4; (+) strand; PAM type: NRG; PAM sequence: AGG
  source 1..20: mol_type = other DNA
agccctgacctggcccagcc

SEQ ID NO: 11099 - DNA, 20 bp, synthetic construct
  misc_feature 1..20: note = Description of Artificial Sequence: Synthetic oligonucleotide
  misc_feature 1..20: note = Target: ANGPTL4; (+) strand; PAM type: NRG; PAM sequence: AAG
  source 1..20: mol_type = other DNA
acccaacccttctcctctgc

SEQ ID NO: 11100 - DNA, 20 bp, synthetic construct
  misc_feature 1..20: note = Description of Artificial Sequence: Synthetic oligonucleotide
  misc_feature 1..20: note = Target: ANGPTL4; (+) strand; PAM type: NRG; PAM sequence: CAG
  source 1..20: mol_type = other DNA
aacccttctcctctgcaagc

SEQ ID NO: 11101 - DNA, 20 bp, synthetic construct
  misc_feature 1..20: note = Description of Artificial Sequence: Synthetic oligonucleotide
  misc_feature 1..20: note = Target: ANGPTL4; (+) strand; PAM type: NRG; PAM sequence: TGG
  source 1..20: mol_type = other DNA
ccttctcctctgcaagccag

SEQ ID NO: 11102 - DNA, 20 bp, synthetic construct
  misc_feature 1..20: note = Description of Artificial Sequence: Synthetic oligonucleotide
  misc_feature 1..20: note = Target: ANGPTL4; (+) strand; PAM type: NRG; PAM sequence: GGG
  source 1..20: mol_type = other DNA
cttctcctctgcaagccagt

SEQ ID NO: 11103 - DNA, 20 bp, synthetic construct
  misc_feature 1..20: note = Description of Artificial Sequence: Synthetic oligonucleotide
  misc_feature 1..20: note = Target: ANGPTL4; (+) strand; PAM type: NRG; PAM sequence: AAG
  source 1..20: mol_type = other DNA
aagccagtgggctgtccctg

SEQ ID NO: 11104 - DNA, 20 bp, synthetic construct
  misc_feature 1..20: note = Description of Artificial Sequence: Synthetic oligonucleotide
  misc_feature 1..20: note = Target: ANGPTL4; (+) strand; PAM type: NRG; PAM sequence: TGG
  source 1..20: mol_type = other DNA
aagccctgctgatcactgat

SEQ ID NO: 11105 - DNA, 20 bp, synthetic construct
  misc_feature 1..20: note = Description of Artificial Sequence: Synthetic oligonucleotide
  misc_feature 1..20: note = Target: ANGPTL4; (+) strand; PAM type: NRG; PAM sequence: CAG
  source 1..20: mol_type = other DNA
ctgctgatcactgattggaa

SEQ ID NO: 11106 - DNA, 20 bp, synthetic construct
  misc_feature 1..20: note = Description of Artificial Sequence: Synthetic oligonucleotide
  misc_feature 1..20: note = Target: ANGPTL4; (+) strand; PAM type: NRG; PAM sequence: GAG
  source 1..20: mol_type = other DNA
gctgatcactgattggaaca

SEQ ID NO: 11107 - DNA, 20 bp, synthetic construct
  misc_feature 1..20: note = Description of Artificial Sequence: Synthetic oligonucleotide
  misc_feature 1..20: note = Target: ANGPTL4; (+) strand; PAM type: NRG; PAM sequence: AGG
  source 1..20: mol_type = other DNA
ctgatcactgattggaacag

SEQ ID NO: 11108 - DNA, 20 bp, synthetic construct
  misc_feature 1..20: note = Description of Artificial Sequence: Synthetic oligonucleotide
  misc_feature 1..20: note = Target: ANGPTL4; (+) strand; PAM type: NRG; PAM sequence: TGG
  source 1..20: mol_type = other DNA
atcactgattggaacagagg

SEQ ID NO: 11109 - DNA, 20 bp, synthetic construct
  misc_feature 1..20: note = Description of Artificial Sequence: Synthetic oligonucleotide
  misc_feature 1..20: note = Target: ANGPTL4; (+) strand; PAM type: NRG; PAM sequence: GAG
  source 1..20: mol_type = other DNA
cactgattggaacagaggtg

SEQ ID NO: 11110 - DNA, 20 bp, synthetic construct
  misc_feature 1..20: note = Description of Artificial Sequence: Synthetic oligonucleotide
  misc_feature 1..20: note = Target: ANGPTL4; (+) strand; PAM type: NRG; PAM sequence: AAG
  source 1..20: mol_type = other DNA
gattggaacagaggtggaga

SEQ ID NO: 11111 - DNA, 20 bp, synthetic construct
  misc_feature 1..20: note = Description of Artificial Sequence: Synthetic oligonucleotide
  misc_feature 1..20: note = Target: ANGPTL4; (+) strand; PAM type: NRG; PAM sequence: GAG
  source 1..20: mol_type = other DNA
ttggaacagaggtggagaaa

SEQ ID NO: 11112 - DNA, 20 bp, synthetic construct
  misc_feature 1..20: note = Description of Artificial Sequence: Synthetic oligonucleotide
  misc_feature 1..20: note = Target: ANGPTL4; (+) strand; PAM type: NRG; PAM sequence: AGG
  source 1..20: mol_type = other DNA
tggaacagaggtggagaaag

SEQ ID NO: 11113 - DNA, 20 bp, synthetic construct
  misc_feature 1..20: note = Description of Artificial Sequence: Synthetic oligonucleotide
  misc_feature 1..20: note = Target: ANGPTL4; (+) strand; PAM type: NRG; PAM sequence: GAG
  source 1..20: mol_type = other DNA
gaggtggagaaagaggtctt

SEQ ID NO: 11114 - DNA, 20 bp, synthetic construct
  misc_feature 1..20: note = Description of Artificial Sequence: Synthetic oligonucleotide
  misc_feature 1..20: note = Target: ANGPTL4; (+) strand; PAM type: NRG; PAM sequence: AGG
  source 1..20: mol_type = other DNA
aggtggagaaagaggtcttg

SEQ ID NO: 11115 - DNA, 20 bp, synthetic construct
  misc_feature 1..20: note = Description of Artificial Sequence: Synthetic oligonucleotide
  misc_feature 1..20: note = Target: ANGPTL4; (+) strand; PAM type: NRG; PAM sequence: GGG
  source 1..20: mol_type = other DNA
ggtggagaaagaggtcttga

SEQ ID NO: 11116 - DNA, 20 bp, synthetic construct
  misc_feature 1..20: note = Description of Artificial Sequence: Synthetic oligonucleotide
  misc_feature 1..20: note = Target: ANGPTL4; (+) strand; PAM type: NRG; PAM sequence: GAG
  source 1..20: mol_type = other DNA
aaagaggtcttgagggactt

SEQ ID NO: 11117 - DNA, 20 bp, synthetic construct
  misc_feature 1..20: note = Description of Artificial Sequence: Synthetic oligonucleotide
  misc_feature 1..20: note = Target: ANGPTL4; (+) strand; PAM type: NRG; PAM sequence: CAG
  source 1..20: mol_type = other DNA
gtcttgagggacttgagctg

SEQ ID NO: 11118 - DNA, 20 bp, synthetic construct
  misc_feature 1..20: note = Description of Artificial Sequence: Synthetic oligonucleotide
  misc_feature 1..20: note = Target: ANGPTL4; (+) strand; PAM type: NRG; PAM sequence: AGG
  source 1..20: mol_type = other DNA
tcttgagggacttgagctgc

SEQ ID NO: 11119 - DNA, 20 bp, synthetic construct
  misc_feature 1..20: note = Description of Artificial Sequence: Synthetic oligonucleotide
  misc_feature 1..20: note = Target: ANGPTL4; (+) strand; PAM type: NRG; PAM sequence: GGG
  source 1..20: mol_type = other DNA
cttgagggacttgagctgca

SEQ ID NO: 11120 - DNA, 20 bp, synthetic construct
  misc_feature 1..20: note = Description of Artificial Sequence: Synthetic oligonucleotide
  misc_feature 1..20: note = Target: ANGPTL4; (+) strand; PAM type: NRG; PAM sequence: GGG
  source 1..20: mol_type = other DNA
ttgagggacttgagctgcag

SEQ ID NO: 11121 - DNA, 20 bp, synthetic construct
  misc_feature 1..20: note = Description of Artificial Sequence: Synthetic oligonucleotide
  misc_feature 1..20: note = Target: ANGPTL4; (+) strand; PAM type: NRG; PAM sequence: TGG
  source 1..20: mol_type = other DNA
gacttgagctgcaggggtgc

SEQ ID NO: 11122 - DNA, 20 bp, synthetic construct
  misc_feature 1..20: note = Description of Artificial Sequence: Synthetic oligonucleotide
  misc_feature 1..20: note = Target: ANGPTL4; (+) strand; PAM type: NRG; PAM sequence: GAG
  source 1..20: mol_type = other DNA
cttgagctgcaggggtgctg

SEQ ID NO: 11123 - DNA, 20 bp, synthetic construct
  misc_feature 1..20: note = Description of Artificial Sequence: Synthetic oligonucleotide
  misc_feature 1..20: note = Target: ANGPTL4; (+) strand; PAM type: NRG; PAM sequence: AAG
  source 1..20: mol_type = other DNA
gagctgcaggggtgctggag

SEQ ID NO: 11124 - DNA, 20 bp, synthetic construct
  misc_feature 1..20: note = Description of Artificial Sequence: Synthetic oligonucleotide
  misc_feature 1..20: note = Target: ANGPTL4; (+) strand; PAM type: NRG; PAM sequence: AGG
  source 1..20: mol_type = other DNA
agctgcaggggtgctggaga

SEQ ID NO: 11125 - DNA, 20 bp, synthetic construct
  misc_feature 1..20: note = Description of Artificial Sequence: Synthetic oligonucleotide
  misc_feature 1..20: note = Target: ANGPTL4; (+) strand; PAM type: NRG; PAM sequence: TAG
  source 1..20: mol_type = other DNA
tgcaggggtgctggagaagg

SEQ ID NO: 11126 - DNA, 20 bp, synthetic construct
  misc_feature 1..20: note = Description of Artificial Sequence: Synthetic oligonucleotide
  misc_feature 1..20: note = Target: ANGPTL4; (+) strand; PAM type: NRG; PAM sequence: TGG
  source 1..20: mol_type = other DNA
ggtgctggagaaggtagaaa

SEQ ID NO: 11127 - DNA, 20 bp, synthetic construct
  misc_feature 1..20: note = Description of Artificial Sequence: Synthetic oligonucleotide
  misc_feature 1..20: note = Target: ANGPTL4; (+) strand; PAM type: NRG; PAM sequence: GGG
  source 1..20: mol_type = other DNA
gtgctggagaaggtagaaat

SEQ ID NO: 11128 - DNA, 20 bp, synthetic construct
  misc_feature 1..20: note = Description of Artificial Sequence: Synthetic oligonucleotide
  misc_feature 1..20: note = Target: ANGPTL4; (+) strand; PAM type: NRG; PAM sequence: GGG
  source 1..20: mol_type = other DNA
tgctggagaaggtagaaatg

SEQ ID NO: 11129 - DNA, 20 bp, synthetic construct
  misc_feature 1..20: note = Description of Artificial Sequence: Synthetic oligonucleotide
  misc_feature 1..20: note = Target: ANGPTL4; (+) strand; PAM type: NRG; PAM sequence: CGG
  source 1..20: mol_type = other DNA
gagaaggtagaaatggggtt

SEQ ID NO: 11130 - DNA, 20 bp, synthetic construct
  misc_feature 1..20: note = Description of Artificial Sequence: Synthetic oligonucleotide
  misc_feature 1..20: note = Target: ANGPTL4; (+) strand; PAM type: NRG; PAM sequence: GGG
  source 1..20: mol_type = other DNA
agaaggtagaaatggggttc

SEQ ID NO: 11131 - DNA, 20 bp, synthetic construct
  misc_feature 1..20: note = Description of Artificial Sequence: Synthetic oligonucleotide
  misc_feature 1..20: note = Target: ANGPTL4; (+) strand; PAM type: NRG; PAM sequence: GGG
  source 1..20: mol_type = other DNA
gaaggtagaaatggggttcg

SEQ ID NO: 11132 - DNA, 20 bp, synthetic construct
  misc_feature 1..20: note = Description of Artificial Sequence: Synthetic oligonucleotide
  misc_feature 1..20: note = Target: ANGPTL4; (+) strand; PAM type: NRG; PAM sequence: AAG
  source 1..20: mol_type = other DNA
gggttcggggtgccatcctg

SEQ ID NO: 11133 - DNA, 20 bp, synthetic construct
  misc_feature 1..20: note = Description of Artificial Sequence: Synthetic oligonucleotide
  misc_feature 1..20: note = Target: ANGPTL4; (+) strand; PAM type: NRG; PAM sequence: AGG
  source 1..20: mol_type = other DNA
ggttcggggtgccatcctga

SEQ ID NO: 11134 - DNA, 20 bp, synthetic construct
  misc_feature 1..20: note = Description of Artificial Sequence: Synthetic oligonucleotide
  misc_feature 1..20: note = Target: ANGPTL4; (+) strand; PAM type: NRG; PAM sequence: TAG
  source 1..20: mol_type = other DNA
cggggtgccatcctgaaggt

SEQ ID NO: 11135 - DNA, 20 bp, synthetic construct
  misc_feature 1..20: note = Description of Artificial Sequence: Synthetic oligonucleotide
  misc_feature 1..20: note = Target: ANGPTL4; (+) strand; PAM type: NRG; PAM sequence: TAG
  source 1..20: mol_type = other DNA
tcctgaaggttagaaccttc

SEQ ID NO: 11136 - DNA, 20 bp, synthetic construct
  misc_feature 1..20: note = Description of Artificial Sequence: Synthetic oligonucleotide
  misc_feature 1..20: note = Target: ANGPTL4; (+) strand; PAM type: NRG; PAM sequence: AGG
  source 1..20: mol_type = other DNA
cctgaaggttagaaccttct

SEQ ID NO: 11137 - DNA, 20 bp, synthetic construct
  misc_feature 1..20: note = Description of Artificial Sequence: Synthetic oligonucleotide
  misc_feature 1..20: note = Target: ANGPTL4; (+) strand; PAM type: NRG; PAM sequence: GGG
  source 1..20: mol_type = other DNA
ctgaaggttagaaccttcta

SEQ ID NO: 11138 - DNA, 20 bp, synthetic construct
  misc_feature 1..20: note = Description of Artificial Sequence: Synthetic oligonucleotide
  misc_feature 1..20: note = Target: ANGPTL4; (+) strand; PAM type: NRG; PAM sequence: GGG
  source 1..20: mol_type = other DNA
tgaaggttagaaccttctag

SEQ ID NO: 11139 - DNA, 20 bp, synthetic construct
  misc_feature 1..20: note = Description of Artificial Sequence: Synthetic oligonucleotide
  misc_feature 1..20: note = Target: ANGPTL4; (+) strand; PAM type: NRG; PAM sequence: GAG
  source 1..20: mol_type = other DNA
aaggttagaaccttctaggg

SEQ ID NO: 11140 - DNA, 20 bp, synthetic construct
  misc_feature 1..20: note = Description of Artificial Sequence: Synthetic oligonucleotide
  misc_feature 1..20: note = Target: ANGPTL4; (+) strand; PAM type: NRG; PAM sequence: AGG
  source 1..20: mol_type = other DNA
aggttagaaccttctagggg

SEQ ID NO: 11141 - DNA, 20 bp, synthetic construct
  misc_feature 1..20: note = Description of Artificial Sequence: Synthetic oligonucleotide
  misc_feature 1..20: note = Target: ANGPTL4; (+) strand; PAM type: NRG; PAM sequence: GGG
  source 1..20: mol_type = other DNA
ggttagaaccttctagggga

SEQ ID NO: 11142 - DNA, 20 bp, synthetic construct
  misc_feature 1..20: note = Description of Artificial Sequence: Synthetic oligonucleotide
  misc_feature 1..20: note = Target: ANGPTL4; (+) strand; PAM type: NRG; PAM sequence: TGG
  source 1..20: mol_type = other DNA
ccttctaggggagggtgtca

SEQ ID NO: 11143 - DNA, 20 bp, synthetic construct
  misc_feature 1..20: note = Description of Artificial Sequence: Synthetic oligonucleotide
  misc_feature 1..20: note = Target: ANGPTL4; (+) strand; PAM type: NRG; PAM sequence: GAG
  source 1..20: mol_type = other DNA
ttctaggggagggtgtcatg

SEQ ID NO: 11144 - DNA, 20 bp, synthetic construct
  misc_feature 1..20: note = Description of Artificial Sequence: Synthetic oligonucleotide
  misc_feature 1..20: note = Target: ANGPTL4; (+) strand; PAM type: NRG; PAM sequence: AGG
  source 1..20: mol_type = other DNA
tctaggggagggtgtcatgg

SEQ ID NO: 11145 - DNA, 20 bp, synthetic construct
  misc_feature 1..20: note = Description of Artificial Sequence: Synthetic oligonucleotide
  misc_feature 1..20: note = Target: ANGPTL4; (+) strand; PAM type: NRG; PAM sequence: GAG
  source 1..20: mol_type = other DNA
taggggagggtgtcatggag

SEQ ID NO: 11146 - DNA, 20 bp, synthetic construct
  misc_feature 1..20: note = Description of Artificial Sequence: Synthetic oligonucleotide
  misc_feature 1..20: note = Target: ANGPTL4; (+) strand; PAM type: NRG; PAM sequence: AGG
  source 1..20: mol_type = other DNA
aggggagggtgtcatggagg

SEQ ID NO: 11147 - DNA, 20 bp, synthetic construct
  misc_feature 1..20: note = Description of Artificial Sequence: Synthetic oligonucleotide
  misc_feature 1..20: note = Target: ANGPTL4; (+) strand; PAM type: NRG; PAM sequence: GGG
  source 1..20: mol_type = other DNA
ggggagggtgtcatggagga

SEQ ID NO: 11148 - DNA, 20 bp, synthetic construct
  misc_feature 1..20: note = Description of Artificial Sequence: Synthetic oligonucleotide
  misc_feature 1..20: note = Target: ANGPTL4; (+) strand; PAM type: NRG; PAM sequence: GGG
  source 1..20: mol_type = other DNA
gggagggtgtcatggaggag

SEQ ID NO: 11149 - DNA, 20 bp, synthetic construct
  misc_feature 1..20: note = Description of Artificial Sequence: Synthetic oligonucleotide
  misc_feature 1..20: note = Target: ANGPTL4; (+) strand; PAM type: NRG; PAM sequence: GGG
  source 1..20: mol_type = other DNA
ggagggtgtcatggaggagg

SEQ ID NO: 11150 - DNA, 20 bp, synthetic construct
  misc_feature 1..20: note = Description of Artificial Sequence: Synthetic oligonucleotide
  misc_feature 1..20: note = Target: ANGPTL4; (+) strand; PAM type: NRG; PAM sequence: CAG
  source 1..20: mol_type = other DNA
tgtcatggaggagggggtgc

SEQ ID NO: 11151 - DNA, 20 bp, synthetic construct
  misc_feature 1..20: note = Description of Artificial Sequence: Synthetic oligonucleotide
  misc_feature 1..20: note = Target: ANGPTL4; (+) strand; PAM type: NRG; PAM sequence: AGG
  source 1..20: mol_type = other DNA
gtcatggaggagggggtgcc

SEQ ID NO: 11152 - DNA, 20 bp, synthetic construct
  misc_feature 1..20: note = Description of Artificial Sequence: Synthetic oligonucleotide
  misc_feature 1..20: note = Target: ANGPTL4; (+) strand; PAM type: NRG; PAM sequence: TAG
  source 1..20: mol_type = other DNA
atggaggagggggtgccagg

SEQ ID NO: 11153 - DNA, 20 bp, synthetic construct
  misc_feature 1..20: note = Description of Artificial Sequence: Synthetic oligonucleotide
  misc_feature 1..20: note = Target: ANGPTL4; (+) strand; PAM type: NRG; PAM sequence: TAG
  source 1..20: mol_type = other DNA
gaggagggggtgccaggtag

SEQ ID NO: 11154 - DNA, 20 bp, synthetic construct
  misc_feature 1..20: note = Description of Artificial Sequence: Synthetic oligonucleotide
  misc_feature 1..20: note = Target: ANGPTL4; (+) strand; PAM type: NRG; PAM sequence: TAG
  source 1..20: mol_type = other DNA
gtgccaggtagtagtgtttg

SEQ ID NO: 11155 - DNA, 20 bp, synthetic construct
  misc_feature 1..20: note = Description of Artificial Sequence: Synthetic oligonucleotide
  misc_feature 1..20: note = Target: ANGPTL4; (+) strand; PAM type: NRG; PAM sequence: TGG
  source 1..20: mol_type = other DNA
ggtagtagtgtttgtagatt

SEQ ID NO: 11156 - DNA, 20 bp, synthetic construct
  misc_feature 1..20: note = Description of Artificial Sequence: Synthetic oligonucleotide
  misc_feature 1..20: note = Target: ANGPTL4; (+) strand; PAM type: NRG; PAM sequence: GGG
  source 1..20: mol_type = other DNA
gtagtagtgtttgtagattt

SEQ ID NO: 11157 - DNA, 20 bp, synthetic construct
  misc_feature 1..20: note = Description of Artificial Sequence: Synthetic oligonucleotide
  misc_feature 1..20: note = Target: ANGPTL4; (+) strand; PAM type: NRG; PAM sequence: TGG
  source 1..20: mol_type = other DNA
ttgggccctccacaatgtct

SEQ ID NO: 11158 - DNA, 20 bp, synthetic construct
  misc_feature 1..20: note = Description of Artificial Sequence: Synthetic oligonucleotide
  misc_feature 1..20: note = Target: ANGPTL4; (+) strand; PAM type: NRG; PAM sequence: GGG
  source 1..20: mol_type = other DNA
tgggccctccacaatgtctt

SEQ ID NO: 11159 - DNA, 20 bp, synthetic construct
  misc_feature 1..20: note = Description of Artificial Sequence: Synthetic oligonucleotide
  misc_feature 1..20: note = Target: ANGPTL4; (+) strand; PAM type: NRG; PAM sequence: GGG
  source 1..20: mol_type = other DNA
gggccctccacaatgtcttg

SEQ ID NO: 11160 - DNA, 20 bp, synthetic construct
  misc_feature 1..20: note = Description of Artificial Sequence: Synthetic oligonucleotide
  misc_feature 1..20: note = Target: ANGPTL4; (+) strand; PAM type: NRG; PAM sequence: TGG
  source 1..20: mol_type = other DNA
ccacaatgtcttggggtatg

SEQ ID NO: 11161 - DNA, 20 bp, synthetic construct
  misc_feature 1..20: note = Description of Artificial Sequence: Synthetic oligonucleotide
  misc_feature 1..20: note = Target: ANGPTL4; (+) strand; PAM type: NRG; PAM sequence: GGG
  source 1..20: mol_type = other DNA
cacaatgtcttggggtatgt

SEQ ID NO: 11162 - DNA, 20 bp, synthetic construct
  misc_feature 1..20: note = Description of Artificial Sequence: Synthetic oligonucleotide
  misc_feature 1..20: note = Target: ANGPTL4; (+) strand; PAM type: NRG; PAM sequence: TAG
  source 1..20: mol_type = other DNA
gtcttggggtatgtgggaat

SEQ ID NO: 11163 - DNA, 20 bp, synthetic construct
  misc_feature 1..20: note = Description of Artificial Sequence: Synthetic oligonucleotide
  misc_feature 1..20: note = Target: ANGPTL4; (+) strand; PAM type: NRG; PAM sequence: AGG
  source 1..20: mol_type = other DNA
tcttggggtatgtgggaatt

SEQ ID NO: 11164 - DNA, 20 bp, synthetic construct
  misc_feature 1..20: note = Description of Artificial Sequence: Synthetic oligonucleotide
  misc_feature 1..20: note = Target: ANGPTL4; (+) strand; PAM type: NRG; PAM sequence: GGG
  source 1..20: mol_type = other DNA
cttggggtatgtgggaatta

SEQ ID NO: 11165 - DNA, 20 bp, synthetic construct
  misc_feature 1..20: note = Description of Artificial Sequence: Synthetic oligonucleotide
  misc_feature 1..20: note = Target: ANGPTL4; (+) strand; PAM type: NRG; PAM sequence: TGG
  source 1..20: mol_type = other DNA
gggtatgtgggaattagggc

SEQ ID NO: 11166 - DNA, 20 bp, synthetic construct
  misc_feature 1..20: note = Description of Artificial Sequence: Synthetic oligonucleotide
  misc_feature 1..20: note = Target: ANGPTL4; (+) strand; PAM type: NRG; PAM sequence: GGG
  source 1..20: mol_type = other DNA
ggtatgtgggaattagggct

SEQ ID NO: 11167 - DNA, 20 bp, synthetic construct
  misc_feature 1..20: note = Description of Artificial Sequence: Synthetic oligonucleotide
  misc_feature 1..20: note = Target: ANGPTL4; (+) strand; PAM type: NRG; PAM sequence: CAG
  source 1..20: mol_type = other DNA
gaattagggctgggaacccc

SEQ ID NO: 11168 - DNA, 20 bp, synthetic construct
  misc_feature 1..20: note = Description of Artificial Sequence: Synthetic oligonucleotide
  misc_feature 1..20: note = Target: ANGPTL4; (+) strand; PAM type: NRG; PAM sequence: CAG
  source 1..20: mol_type = other DNA
ggctgggaacccccagctcc

SEQ ID NO: 11169 - DNA, 20 bp, synthetic construct
  misc_feature 1..20: note = Description of Artificial Sequence: Synthetic oligonucleotide
  misc_feature 1..20: note = Target: ANGPTL4; (+) strand; PAM type: NRG; PAM sequence: CAG
  source 1..20: mol_type = other DNA
ggaacccccagctcccagac

SEQ ID NO: 11170 - DNA, 20 bp, synthetic construct
  misc_feature 1..20: note = Description of Artificial Sequence: Synthetic oligonucleotide
  misc_feature 1..20: note = Target: ANGPTL4; (+) strand; PAM type: NRG; PAM sequence: CAG
  source 1..20: mol_type = other DNA
atcttacaaatccaatgctc

SEQ ID NO: 11171 - DNA, 20 bp, synthetic construct
  misc_feature 1..20: note = Description of Artificial Sequence: Synthetic oligonucleotide
  misc_feature 1..20: note = Target: ANGPTL4; (+) strand; PAM type: NRG; PAM sequence: AGG
  source 1..20: mol_type = other DNA
tcttacaaatccaatgctcc

SEQ ID NO: 11172 - DNA, 20 bp, synthetic construct
  misc_feature 1..20: note = Description of Artificial Sequence: Synthetic oligonucleotide
  misc_feature 1..20: note = Target: ANGPTL4; (+) strand; PAM type: NRG; PAM sequence: CGG
  source 1..20: mol_type = other DNA
tcctccctccccgcccccgc

SEQ ID NO: 11173 - DNA, 20 bp, synthetic construct
  misc_feature 1..20: note = Description of Artificial Sequence: Synthetic oligonucleotide
  misc_feature 1..20: note = Target: ANGPTL4; (+) strand; PAM type: NRG; PAM sequence: CAG
  source 1..20: mol_type = other DNA
cgccggccccctccccaccg

SEQ ID NO: 11174 - DNA, 20 bp, synthetic construct
  misc_feature 1..20: note = Description of Artificial Sequence: Synthetic oligonucleotide
  misc_feature 1..20: note = Target: ANGPTL4; (+) strand; PAM type: NRG; PAM sequence: AAG
  source 1..20: mol_type = other DNA
ggccccctccccaccgcaga

SEQ ID NO: 11175 - DNA, 20 bp, synthetic construct
  misc_feature 1..20: note = Description of Artificial Sequence: Synthetic oligonucleotide
  misc_feature 1..20: note = Target: ANGPTL4; (+) strand; PAM type: NRG; PAM sequence: TGG
  source 1..20: mol_type = other DNA
cccctccccaccgcagaaag

SEQ ID NO: 11176 - DNA, 20 bp, synthetic construct
  misc_feature 1..20: note = Description of Artificial Sequence: Synthetic oligonucleotide
  misc_feature 1..20: note = Target: ANGPTL4; (+) strand; PAM type: NRG; PAM sequence: GGG
  source 1..20: mol_type = other DNA
ccctccccaccgcagaaagt

SEQ ID NO: 11177 - DNA, 20 bp, synthetic construct
  misc_feature 1..20: note = Description of Artificial Sequence: Synthetic oligonucleotide
  misc_feature 1..20: note = Target: ANGPTL4; (+) strand; PAM type: NRG; PAM sequence: AAG
  source 1..20: mol_type = other DNA
tgggcttttgctgccaccac

SEQ ID NO: 11178 - DNA, 20 bp, synthetic construct
  misc_feature 1..20: note = Description of Artificial Sequence: Synthetic oligonucleotide
  misc_feature 1..20: note = Target: ANGPTL4; (+) strand; PAM type: NRG; PAM sequence: TAG
  source 1..20: mol_type = other DNA
tttgctgccaccacaagttg

SEQ ID NO: 11179 - DNA, 20 bp, synthetic construct
  misc_feature 1..20: note = Description of Artificial Sequence: Synthetic oligonucleotide
  misc_feature 1..20: note = Target: ANGPTL4; (+) strand; PAM type: NRG; PAM sequence: AGG
  source 1..20: mol_type = other DNA
ttgctgccaccacaagttgt

SEQ ID NO: 11180 - DNA, 20 bp, synthetic construct
  misc_feature 1..20: note = Description of Artificial Sequence: Synthetic oligonucleotide
  misc_feature 1..20: note = Target: ANGPTL4; (+) strand; PAM type: NRG; PAM sequence: CAG
  source 1..20: mol_type = other DNA
tctccgttcatctcgaacca

SEQ ID NO: 11181 - DNA, 20 bp, synthetic construct
  misc_feature 1..20: note = Description of Artificial Sequence: Synthetic oligonucleotide
  misc_feature 1..20: note = Target: ANGPTL4; (+) strand; PAM type: NRG; PAM sequence: CAG
  source 1..20: mol_type = other DNA
atgtccacgtgtgtccgatg

SEQ ID NO: 11182 - DNA, 20 bp, synthetic construct
  misc_feature 1..20: note = Description of Artificial Sequence: Synthetic oligonucleotide
  misc_feature 1..20: note = Target: ANGPTL4; (+) strand; PAM type: NRG; PAM sequence: CGG
  source 1..20: mol_type = other DNA
gtgtgtccgatgcagactcg

SEQ ID NO: 11183 - DNA, 20 bp, synthetic construct
  misc_feature 1..20: note = Description of Artificial Sequence: Synthetic oligonucleotide
  misc_feature 1..20: note = Target: ANGPTL4; (+) strand; PAM type: NRG; PAM sequence: AAG
  source 1..20: mol_type = other DNA
atgcagactcgcggttctct

SEQ ID NO: 11184 - DNA, 20 bp, synthetic construct
  misc_feature 1..20: note = Description of Artificial Sequence: Synthetic oligonucleotide
  misc_feature 1..20: note = Target: ANGPTL4; (+) strand; PAM type: NRG; PAM sequence: CGG
  source 1..20: mol_type = other DNA
ctcgcggttctctaagttca

SEQ ID NO: 11185 - DNA, 20 bp, synthetic construct
  misc_feature 1..20: note = Description of Artificial Sequence: Synthetic oligonucleotide
  misc_feature 1..20: note = Target: ANGPTL4; (+) strand; PAM type: NRG; PAM sequence: CGG
  source 1..20: mol_type = other DNA
tctaagttcacggccccaca

SEQ ID NO: 11186 - DNA, 20 bp, synthetic construct
  misc_feature 1..20: note = Description of Artificial Sequence: Synthetic oligonucleotide
  misc_feature 1..20: note = Target: ANGPTL4; (+) strand; PAM type: NRG; PAM sequence: TGG
  source 1..20: mol_type = other DNA
ggccccacacggtttctctg

SEQ ID NO: 11187 - DNA, 20 bp, synthetic construct
  misc_feature 1..20: note = Description of Artificial Sequence: Synthetic oligonucleotide
  misc_feature 1..20: note = Target: ANGPTL4; (+) strand; PAM type: NRG; PAM sequence: TGG
  source 1..20: mol_type = other DNA
ctcatccttccctgcatctg

SEQ ID NO: 11188 - DNA, 20 bp, synthetic construct
  misc_feature 1..20: note = Description of Artificial Sequence: Synthetic oligonucleotide
  misc_feature 1..20: note = Target: ANGPTL4; (+) strand; PAM type: NRG; PAM sequence: CAG
  source 1..20: mol_type = other DNA
cctgcatctgtggctgtcca

SEQ ID NO: 11189 - DNA, 20 bp, synthetic construct
  misc_feature 1..20: note = Description of Artificial Sequence: Synthetic oligonucleotide
  misc_feature 1..20: note = Target: ANGPTL4; (+) strand; PAM type: NRG; PAM sequence: TGG
  source 1..20: mol_type = other DNA
tgtggctgtccacagccaac

SEQ ID NO: 11190 - DNA, 20 bp, synthetic construct
  misc_feature 1..20: note = Description of Artificial Sequence: Synthetic oligonucleotide
  misc_feature 1..20: note = Target: ANGPTL4; (+) strand; PAM type: NRG; PAM sequence: GGG
  source 1..20: mol_type = other DNA
gtggctgtccacagccaact

SEQ ID NO: 11191 - DNA, 20 bp, synthetic construct
  misc_feature 1..20: note = Description of Artificial Sequence: Synthetic oligonucleotide
  misc_feature 1..20: note = Target: ANGPTL4; (+) strand; PAM type: NRG; PAM sequence: AAG
  source 1..20: mol_type = other DNA
gtccacagccaactgggtga

SEQ ID NO: 11192 - DNA, 20 bp, synthetic construct
  misc_feature 1..20: note = Description of Artificial Sequence: Synthetic oligonucleotide
  misc_feature 1..20: note = Target: ANGPTL4; (+) strand; PAM type: NRG; PAM sequence: TGG
  source 1..20: mol_type = other DNA
cagccaactgggtgaaagtt

SEQ ID NO: 11193 - DNA, 20 bp, synthetic construct
  misc_feature 1..20: note = Description of Artificial Sequence: Synthetic oligonucleotide
  misc_feature 1..20: note = Target: ANGPTL4; (+) strand; PAM type: NRG; PAM sequence: TAG
  source 1..20: mol_type = other DNA
tggatccccctctcacaccc

SEQ ID NO: 11194 - DNA, 20 bp, synthetic construct
  misc_feature 1..20: note = Description of Artificial Sequence: Synthetic oligonucleotide
  misc_feature 1..20: note = Target: ANGPTL4; (+) strand; PAM type: NRG; PAM sequence: AGG
  source 1..20: mol_type = other DNA
ggatccccctctcacaccct

SEQ ID NO: 11195 - DNA, 20 bp, synthetic construct
  misc_feature 1..20: note = Description of Artificial Sequence: Synthetic oligonucleotide
  misc_feature 1..20: note = Target: ANGPTL4; (+) strand; PAM type: NRG; PAM sequence: GGG
  source 1..20: mol_type = other DNA
gatccccctctcacacccta

SEQ ID NO: 11196 - DNA, 20 bp, synthetic construct
  misc_feature 1..20: note = Description of Artificial Sequence: Synthetic oligonucleotide
  misc_feature 1..20: note = Target: ANGPTL4; (+) strand; PAM type: NRG; PAM sequence: CAG
  source 1..20: mol_type = other DNA
cccctctcacaccctagggt

SEQ ID NO: 11197 - DNA, 20 bp, synthetic construct
  misc_feature 1..20: note = Description of Artificial Sequence: Synthetic oligonucleotide
  misc_feature 1..20: note = Target: ANGPTL4; (+) strand; PAM type: NRG; PAM sequence: TGG
  source 1..20: mol_type = other DNA
ctctcacaccctagggtcag

SEQ ID NO: 11198 - DNA, 20 bp, synthetic construct
  misc_feature 1..20: note = Description of Artificial Sequence: Synthetic oligonucleotide
  misc_feature 1..20: note = Target: ANGPTL4; (+) strand; PAM type: NRG; PAM sequence: CAG
  source 1..20: mol_type = other DNA
tcacaccctagggtcagtgg

SEQ ID NO: 11199 - DNA, 20 bp, synthetic construct
  misc_feature 1..20: note = Description of Artificial Sequence: Synthetic oligonucleotide
  misc_feature 1..20: note = Target: ANGPTL4; (+) strand; PAM type: NRG; PAM sequence: AGG
  source 1..20: mol_type = other DNA
cacaccctagggtcagtggc

SEQ ID NO: 11200 - DNA, 20 bp, synthetic construct
  misc_feature 1..20: note = Description of Artificial Sequence: Synthetic oligonucleotide
  misc_feature 1..20: note = Target: ANGPTL4; (+) strand; PAM type: NRG; PAM sequence: CAG
  source 1..20: mol_type = other DNA
tagggtcagtggcaggcttc

SEQ ID NO: 11201 - DNA, 20 bp, synthetic construct
  misc_feature 1..20: note = Description of Artificial Sequence: Synthetic oligonucleotide
  misc_feature 1..20: note = Target: ANGPTL4; (+) strand; PAM type: NRG; PAM sequence: TAG
  source 1..20: mol_type = other DNA
gtggcaggcttccagcactg

SEQ ID NO: 11202 - DNA, 20 bp, synthetic construct
  misc_feature 1..20: note = Description of Artificial Sequence: Synthetic oligonucleotide
  misc_feature 1..20: note = Target: ANGPTL4; (+) strand; PAM type: NRG; PAM sequence: GAG
  source 1..20: mol_type = other DNA
gcttccagcactgtagacct

SEQ ID NO: 11203 - DNA, 20 bp, synthetic construct
  misc_feature 1..20: note = Description of Artificial Sequence: Synthetic oligonucleotide
  misc_feature 1..20: note = Target: ANGPTL4; (+) strand; PAM type: NRG; PAM sequence: AGG
  source 1..20: mol_type = other DNA
cttccagcactgtagacctg

SEQ ID NO: 11204 - DNA, 20 bp, synthetic construct
  misc_feature 1..20: note = Description of Artificial Sequence: Synthetic oligonucleotide
  misc_feature 1..20: note = Target: ANGPTL4; (+) strand; PAM type: NRG; PAM sequence: GGG
  source 1..20: mol_type = other DNA
ttccagcactgtagacctga

SEQ ID NO: 11205 - DNA, 20 bp, synthetic construct
  misc_feature 1..20: note = Description of Artificial Sequence: Synthetic oligonucleotide
  misc_feature 1..20: note = Target: ANGPTL4; (+) strand; PAM type: NRG; PAM sequence: AAG
  source 1..20: mol_type = other DNA
ctgagggttctctcctcccc

SEQ ID NO: 11206 - DNA, 20 bp, synthetic construct
  misc_feature 1..20: note = Description of Artificial Sequence: Synthetic oligonucleotide
  misc_feature 1..20: note = Target: ANGPTL4; (+) strand; PAM type: NRG; PAM sequence: CAG
  source 1..20: mol_type = other DNA
ctgcccgcccccaaccccgc

SEQ ID NO: 11207 - DNA, 20 bp, synthetic construct
  misc_feature 1..20: note = Description of Artificial Sequence: Synthetic oligonucleotide
  misc_feature 1..20: note = Target: ANGPTL4; (+) strand; PAM type: NRG; PAM sequence: AGG
  source 1..20: mol_type = other DNA
tgcccgcccccaaccccgcc

SEQ ID NO: 11208 - DNA, 20 bp, synthetic construct
  misc_feature 1..20: note = Description of Artificial Sequence: Synthetic oligonucleotide
  misc_feature 1..20: note = Target: ANGPTL4; (+) strand; PAM type: NRG; PAM sequence: TAG
  source 1..20: mol_type = other DNA
cgcccccaaccccgccaggc

SEQ ID NO: 11209 - DNA, 20 bp, synthetic construct
  misc_feature 1..20: note = Description of Artificial Sequence: Synthetic oligonucleotide
  misc_feature 1..20: note = Target: ANGPTL4; (+) strand; PAM type: NRG; PAM sequence: CAG
  source 1..20: mol_type = other DNA
accccgccaggctagcatct

SEQ ID NO: 11210 - DNA, 20 bp, synthetic construct
  misc_feature 1..20: note = Description of Artificial Sequence: Synthetic oligonucleotide
  misc_feature 1..20: note = Target: ANGPTL4; (+) strand; PAM type: NRG; PAM sequence: TGG
  source 1..20: mol_type = other DNA
gccaggctagcatctcagcg

SEQ ID NO: 11211 - DNA, 20 bp, synthetic construct
  misc_feature 1..20: note = Description of Artificial Sequence: Synthetic oligonucleotide
  misc_feature 1..20: note = Target: ANGPTL4; (+) strand; PAM type: NRG; PAM sequence: CAG
  source 1..20: mol_type = other DNA
ggctagcatctcagcgtggt

SEQ ID NO: 11212 - DNA, 20 bp, synthetic construct
  misc_feature 1..20: note = Description of Artificial Sequence: Synthetic oligonucleotide
  misc_feature 1..20: note = Target: ANGPTL4; (+) strand; PAM type: NRG; PAM sequence: AGG
  source 1..20: mol_type = other DNA
gctagcatctcagcgtggtc

SEQ ID NO: 11213 - DNA, 20 bp, synthetic construct
  misc_feature 1..20: note = Description of Artificial Sequence: Synthetic oligonucleotide
  misc_feature 1..20: note = Target: ANGPTL4; (+) strand; PAM type: NRG; PAM sequence: GGG
  source 1..20: mol_type = other DNA
ctagcatctcagcgtggtca

SEQ ID NO: 11214 - DNA, 20 bp, synthetic construct
  misc_feature 1..20: note = Description of Artificial Sequence: Synthetic oligonucleotide
  misc_feature 1..20: note = Target: ANGPTL4; (+) strand; PAM type: NRG; PAM sequence: AAG
  source 1..20: mol_type = other DNA
gggtcctgtccaccctccca

SEQ ID NO: 11215 - DNA, 20 bp, synthetic construct
  misc_feature 1..20: note = Description of Artificial Sequence: Synthetic oligonucleotide
  misc_feature 1..20: note = Target: ANGPTL4; (+) strand; PAM type: NRG; PAM sequence: CAG
  source 1..20: mol_type = other DNA
ccctcccaaagccaccatcc

SEQ ID NO: 11216 - DNA, 20 bp, synthetic construct
  misc_feature 1..20: note = Description of Artificial Sequence: Synthetic oligonucleotide
  misc_feature 1..20: note = Target: ANGPTL4; (+) strand; PAM type: NRG; PAM sequence: AGG
  source 1..20: mol_type = other DNA
cctcccaaagccaccatccc

SEQ ID NO: 11217 - DNA, 20 bp, synthetic construct
  misc_feature 1..20: note = Description of Artificial Sequence: Synthetic oligonucleotide
  misc_feature 1..20: note = Target: ANGPTL4; (+) strand; PAM type: NRG; PAM sequence: GAG
  source 1..20: mol_type = other DNA
caaagccaccatcccaggat

SEQ ID NO: 11218 - DNA, 20 bp, synthetic construct
  misc_feature 1..20: note = Description of Artificial Sequence: Synthetic oligonucleotide
  misc_feature 1..20: note = Target: ANGPTL4; (+) strand; PAM type: NRG; PAM sequence: AGG
  source 1..20: mol_type = other DNA
aaagccaccatcccaggatg

SEQ ID NO: 11219 - DNA, 20 bp, synthetic construct
  misc_feature 1..20: note = Description of Artificial Sequence: Synthetic oligonucleotide
  misc_feature 1..20: note = Target: ANGPTL4; (+) strand; PAM type: NRG; PAM sequence: GGG
  source 1..20: mol_type = other DNA
aagccaccatcccaggatga

SEQ ID NO: 11220 - DNA, 20 bp, synthetic construct
  misc_feature 1..20: note = Description of Artificial Sequence: Synthetic oligonucleotide
  misc_feature 1..20: note = Target: ANGPTL4; (+) strand; PAM type: NRG; PAM sequence: GGG
  source 1..20: mol_type = other DNA
agccaccatcccaggatgag

SEQ ID NO: 11221 - DNA, 20 bp, synthetic construct
  misc_feature 1..20: note = Description of Artificial Sequence: Synthetic oligonucleotide
  misc_feature 1..20: note = Target: ANGPTL4; (+) strand; PAM type: NRG; PAM sequence: TGG
  source 1..20: mol_type = other DNA
atcccaggatgaggggcttc

SEQ ID NO: 11222 - DNA, 20 bp, synthetic construct
  misc_feature 1..20: note = Description of Artificial Sequence: Synthetic oligonucleotide
  misc_feature 1..20: note = Target: ANGPTL4; (+) strand; PAM type: NRG; PAM sequence: GAG
  source 1..20: mol_type = other DNA
cccaggatgaggggcttctg

SEQ ID NO: 11223 - DNA, 20 bp, synthetic construct
  misc_feature 1..20: note = Description of Artificial Sequence: Synthetic oligonucleotide
  misc_feature 1..20: note = Target: ANGPTL4; (+) strand; PAM type: NRG; PAM sequence: AGG
  source 1..20: mol_type = other DNA
ccaggatgaggggcttctgg

SEQ ID NO: 11224 - DNA, 20 bp, synthetic construct
  misc_feature 1..20: note = Description of Artificial Sequence: Synthetic oligonucleotide
  misc_feature 1..20: note = Target: ANGPTL4; (+) strand; PAM type: NRG; PAM sequence: GGG
  source 1..20: mol_type = other DNA
caggatgaggggcttctgga

SEQ ID NO: 11225 - DNA, 20 bp, synthetic construct
  misc_feature 1..20: note = Description of Artificial Sequence: Synthetic oligonucleotide
  misc_feature 1..20: note = Target: ANGPTL4; (+) strand; PAM type: NRG; PAM sequence: CGG
  source 1..20: mol_type = other DNA
gaggggcttctggagggtga

SEQ ID NO: 11226 - DNA, 20 bp, synthetic construct
  misc_feature 1..20: note = Description of Artificial Sequence: Synthetic oligonucleotide
  misc_feature 1..20: note = Target: ANGPTL4; (+) strand; PAM type: NRG; PAM sequence: GGG
  source 1..20: mol_type = other DNA
aggggcttctggagggtgac

SEQ ID NO: 11227 - DNA, 20 bp, synthetic construct
  misc_feature 1..20: note = Description of Artificial Sequence: Synthetic oligonucleotide
  misc_feature 1..20: note = Target: ANGPTL4; (+) strand; PAM type: NRG; PAM sequence: GGG
  source 1..20: mol_type = other DNA
ggggcttctggagggtgacg

SEQ ID NO: 11228 - DNA, 20 bp, synthetic construct
  misc_feature 1..20: note = Description of Artificial Sequence: Synthetic oligonucleotide
  misc_feature 1..20: note = Target: ANGPTL4; (+) strand; PAM type: NRG; PAM sequence: GGG
  source 1..20: mol_type = other DNA
gggcttctggagggtgacgg

SEQ ID NO: 11229 - DNA, 20 bp, synthetic construct
  misc_feature 1..20: note = Description of Artificial Sequence: Synthetic oligonucleotide
  misc_feature 1..20: note = Target: ANGPTL4; (+) strand; PAM type: NRG; PAM sequence: AAG
  source 1..20: mol_type = other DNA
cttctggagggtgacggggg

SEQ ID NO: 11230 - DNA, 20 bp, synthetic construct
  misc_feature 1..20: note = Description of Artificial Sequence: Synthetic oligonucleotide
  misc_feature 1..20: note = Target: ANGPTL4; (+) strand; PAM type: NRG; PAM sequence: AGG
  source 1..20: mol_type = other DNA
ttctggagggtgacggggga

SEQ ID NO: 11231 - DNA, 20 bp, synthetic construct
  misc_feature 1..20: note = Description of Artificial Sequence: Synthetic oligonucleotide
  misc_feature 1..20: note = Target: ANGPTL4; (+) strand; PAM type: NRG; PAM sequence: AAG
  source 1..20: mol_type = other DNA
agggtgacgggggaaggcac

SEQ ID NO: 11232 - DNA, 20 bp, synthetic construct
  misc_feature 1..20: note = Description of Artificial Sequence: Synthetic oligonucleotide
  misc_feature 1..20: note = Target: ANGPTL4; (+) strand; PAM type: NRG; PAM sequence: TGG
  source 1..20: mol_type = other DNA
acgggggaaggcacaagtcc

SEQ ID NO: 11233 - DNA, 20 bp, synthetic construct
  misc_feature 1..20: note = Description of Artificial Sequence: Synthetic oligonucleotide
  misc_feature 1..20: note = Target: ANGPTL4; (+) strand; PAM type: NRG; PAM sequence: TGG
  source 1..20: mol_type = other DNA
gggaaggcacaagtcctggc

SEQ ID NO: 11234 - DNA, 20 bp, synthetic construct
  misc_feature 1..20: note = Description of Artificial Sequence: Synthetic oligonucleotide
  misc_feature 1..20: note = Target: ANGPTL4; (+) strand; PAM type: NRG; PAM sequence: GGG
  source 1..20: mol_type = other DNA
ggaaggcacaagtcctggct

SEQ ID NO: 11235 - DNA, 20 bp, synthetic construct
  misc_feature 1..20: note = Description of Artificial Sequence: Synthetic oligonucleotide
  misc_feature 1..20: note = Target: ANGPTL4; (+) strand; PAM type: NRG; PAM sequence: CGG
  source 1..20: mol_type = other DNA
caagtcctggctgggaaatg

SEQ ID NO: 11236 - DNA, 20 bp, synthetic construct
  misc_feature 1..20: note = Description of Artificial Sequence: Synthetic oligonucleotide
  misc_feature 1..20: note = Target: ANGPTL4; (+) strand; PAM type: NRG; PAM sequence: TGG
  source 1..20: mol_type = other DNA
gtcctggctgggaaatgcgg

SEQ ID NO: 11237 - DNA, 20 bp, synthetic construct
  misc_feature 1..20: note = Description of Artificial Sequence: Synthetic oligonucleotide
  misc_feature 1..20: note = Target: ANGPTL4; (+) strand; PAM type: NRG; PAM sequence: AAG
  source 1..20: mol_type = other DNA
ctggctgggaaatgcggtgg

SEQ ID NO: 11238 - DNA, 20 bp, synthetic construct
  misc_feature 1..20: note = Description of Artificial Sequence: Synthetic oligonucleotide
  misc_feature 1..20: note = Target: ANGPTL4; (+) strand; PAM type: NRG; PAM sequence: AGG
  source 1..20: mol_type = other DNA
tggctgggaaatgcggtgga

SEQ ID NO: 11239 - DNA, 20 bp, synthetic construct
  misc_feature 1..20: note = Description of Artificial Sequence: Synthetic oligonucleotide
  misc_feature 1..20: note = Target: ANGPTL4; (+) strand; PAM type: NRG; PAM sequence: GGG
  source 1..20: mol_type = other DNA
ggctgggaaatgcggtggaa

SEQ ID NO: 11240 - DNA, 20 bp, synthetic construct
  misc_feature 1..20: note = Description of Artificial Sequence: Synthetic oligonucleotide
  misc_feature 1..20: note = Target: ANGPTL4; (+) strand; PAM type: NRG; PAM sequence: GGG
  source 1..20: mol_type = other DNA
gctgggaaatgcggtggaag

SEQ ID NO: 11241 - DNA, 20 bp, synthetic construct
  misc_feature 1..20: note = Description of Artificial Sequence: Synthetic oligonucleotide
  misc_feature 1..20: note = Target: ANGPTL4; (+) strand; PAM type: NRG; PAM sequence: GGG
  source 1..20: mol_type = other DNA
ctgggaaatgcggtggaagg

SEQ ID NO: 11242 - DNA, 20 bp, synthetic construct
  misc_feature 1..20: note = Description of Artificial Sequence: Synthetic oligonucleotide
  misc_feature 1..20: note = Target: ANGPTL4; (+) strand; PAM type: NRG; PAM sequence: CAG
  source 1..20: mol_type = other DNA
ggaaatgcggtggaaggggg

SEQ ID NO: 11243 - DNA, 20 bp, synthetic construct
  misc_feature 1..20: note = Description of Artificial Sequence: Synthetic oligonucleotide
  misc_feature 1..20: note = Target: ANGPTL4; (+) strand; PAM type: NRG; PAM sequence: AGG
  source 1..20: mol_type = other DNA
gaaatgcggtggaagggggc

SEQ ID NO: 11244 - DNA, 20 bp, synthetic construct
  misc_feature 1..20: note = Description of Artificial Sequence: Synthetic oligonucleotide
  misc_feature 1..20: note = Target: ANGPTL4; (+) strand; PAM type: NRG; PAM sequence: GGG
  source 1..20: mol_type = other DNA
aaatgcggtggaagggggca

SEQ ID NO: 11245 - DNA, 20 bp, synthetic construct
  misc_feature 1..20: note = Description of Artificial Sequence: Synthetic oligonucleotide
  misc_feature 1..20: note = Target: ANGPTL4; (+) strand; PAM type: NRG; PAM sequence: GGG
  source 1..20: mol_type = other DNA
aatgcggtggaagggggcag

SEQ ID NO: 11246 - DNA, 20 bp, synthetic construct
  misc_feature 1..20: note = Description of Artificial Sequence: Synthetic oligonucleotide
  misc_feature 1..20: note = Target: ANGPTL4; (+) strand; PAM type: NRG; PAM sequence: TGG
  source 1..20: mol_type = other DNA
ggaagggggcaggggttctg

SEQ ID NO: 11247 - DNA, 20 bp, synthetic construct
  misc_feature 1..20: note = Description of Artificial Sequence: Synthetic oligonucleotide
  misc_feature 1..20: note = Target: ANGPTL4; (+) strand; PAM type: NRG; PAM sequence: GGG
  source 1..20: mol_type = other DNA
gaagggggcaggggttctgt

SEQ ID NO: 11248 - DNA, 20 bp, synthetic construct
  misc_feature 1..20: note = Description of Artificial Sequence: Synthetic oligonucleotide
  misc_feature 1..20: note = Target: ANGPTL4; (+) strand; PAM type: NRG; PAM sequence: CGG
  source 1..20: mol_type = other DNA
gggcaggggttctgtgggtt

SEQ ID NO: 11249 - DNA, 20 bp, synthetic construct
  misc_feature 1..20: note = Description of Artificial Sequence: Synthetic oligonucleotide
  misc_feature 1..20: note = Target: ANGPTL4; (+) strand; PAM type: NRG; PAM sequence: GGG
  source 1..20: mol_type = other DNA
ggcaggggttctgtgggttc

SEQ ID NO: 11250 - DNA, 20 bp, synthetic construct
  misc_feature 1..20: note = Description of Artificial Sequence: Synthetic oligonucleotide
  misc_feature 1..20: note = Target: ANGPTL4; (+) strand; PAM type: NRG; PAM sequence: CAG
  source 1..20: mol_type = other DNA
ttctgtgggttcgggactcc

SEQ ID NO: 11251 - DNA, 20 bp, synthetic construct
  misc_feature 1..20: note = Description of Artificial Sequence: Synthetic oligonucleotide
  misc_feature 1..20: note = Target: ANGPTL4; (+) strand; PAM type: NRG; PAM sequence: TGG
  source 1..20: mol_type = other DNA
gttcgggactcccagactct

SEQ ID NO: 11252 - DNA, 20 bp, synthetic construct
  misc_feature 1..20: note = Description of Artificial Sequence: Synthetic oligonucleotide
  misc_feature 1..20: note = Target: ANGPTL4; (+) strand; PAM type: NRG; PAM sequence: CAG
  source 1..20: mol_type = other DNA
ggactcccagactcttggct

SEQ ID NO: 11253 - DNA, 20 bp, synthetic construct
  misc_feature 1..20: note = Description of Artificial Sequence: Synthetic oligonucleotide
  misc_feature 1..20: note = Target: ANGPTL4; (+) strand; PAM type: NRG; PAM sequence: AGG
  source 1..20: mol_type = other DNA
gactcccagactcttggctc

SEQ ID NO: 11254 - DNA, 20 bp, synthetic construct
  misc_feature 1..20: note = Description of Artificial Sequence: Synthetic oligonucleotide
  misc_feature 1..20: note = Target: ANGPTL4; (+) strand; PAM type: NRG; PAM sequence: AAG
  source 1..20: mol_type = other DNA
actcttggctcaggcccgcc

SEQ ID NO: 11255 - DNA, 20 bp, synthetic construct
  misc_feature 1..20: note = Description of Artificial Sequence: Synthetic oligonucleotide
  misc_feature 1..20: note = Target: ANGPTL4; (+) strand; PAM type: NRG; PAM sequence: TAG
  source 1..20: mol_type = other DNA
cttggctcaggcccgccaag

SEQ ID NO: 11256 - DNA, 20 bp, synthetic construct
  misc_feature 1..20: note = Description of Artificial Sequence: Synthetic oligonucleotide
  misc_feature 1..20: note = Target: ANGPTL4; (+) strand; PAM type: NRG; PAM sequence: AGG
  source 1..20: mol_type = other DNA
ttggctcaggcccgccaagt

SEQ ID NO: 11257 - DNA, 20 bp, synthetic construct
  misc_feature 1..20: note = Description of Artificial Sequence: Synthetic oligonucleotide
  misc_feature 1..20: note = Target: ANGPTL4; (+) strand; PAM type: NRG; PAM sequence: GAG
  source 1..20: mol_type = other DNA
ggctcaggcccgccaagtag

SEQ ID NO: 11258 - DNA, 20 bp, synthetic construct
  misc_feature 1..20: note = Description of Artificial Sequence: Synthetic oligonucleotide
  misc_feature 1..20: note = Target: ANGPTL4; (+) strand; PAM type: NRG; PAM sequence: AAG
  source 1..20: mol_type = other DNA
caggcccgccaagtaggaga

SEQ ID NO: 11259 - DNA, 20 bp, synthetic construct
  misc_feature 1..20: note = Description of Artificial Sequence: Synthetic oligonucleotide
  misc_feature 1..20: note = Target: ANGPTL4; (+) strand; PAM type: NRG; PAM sequence: CAG
  source 1..20: mol_type = other DNA
ccgccaagtaggagaaagtt

SEQ ID NO: 11260 - DNA, 20 bp, synthetic construct
  misc_feature 1..20: note = Description of Artificial Sequence: Synthetic oligonucleotide
  misc_feature 1..20: note = Target: ANGPTL4; (+) strand; PAM type: NRG; PAM sequence: GAG
  source 1..20: mol_type = other DNA
gccaagtaggagaaagttca

SEQ ID NO: 11261 - DNA, 20 bp, synthetic construct
  misc_feature 1..20: note = Description of Artificial Sequence: Synthetic oligonucleotide
  misc_feature 1..20: note = Target: ANGPTL4; (+) strand; PAM type: NRG; PAM sequence: TGG
  source 1..20: mol_type = other DNA
agtaggagaaagttcagagc

SEQ ID NO: 11262 - DNA, 20 bp, synthetic construct
  misc_feature 1..20: note = Description of Artificial Sequence: Synthetic oligonucleotide
  misc_feature 1..20: note = Target: ANGPTL4; (+) strand; PAM type: NRG; PAM sequence: GGG
  source 1..20: mol_type = other DNA
gtaggagaaagttcagagct

SEQ ID NO: 11263 - DNA, 20 bp, synthetic construct
  misc_feature 1..20: note = Description of Artificial Sequence: Synthetic oligonucleotide
  misc_feature 1..20: note = Target: ANGPTL4; (+) strand; PAM type: NRG; PAM sequence: AAG
  source 1..20: mol_type = other DNA
ggagaaagttcagagctggg

SEQ ID NO: 11264 - DNA, 20 bp, synthetic construct
  misc_feature 1..20: note = Description of Artificial Sequence: Synthetic oligonucleotide
  misc_feature 1..20: note = Target: ANGPTL4; (+) strand; PAM type: NRG; PAM sequence: AGG
  source 1..20: mol_type = other DNA
gagaaagttcagagctggga

SEQ ID NO: 11265 - DNA, 20 bp, synthetic construct
  misc_feature 1..20: note = Description of Artificial Sequence: Synthetic oligonucleotide
  misc_feature 1..20: note = Target: ANGPTL4; (+) strand; PAM type: NRG; PAM sequence: CAG
  source 1..20: mol_type = other DNA
ttcagagctgggaaggcgaa

SEQ ID NO: 11266 - DNA, 20 bp, synthetic construct
  misc_feature 1..20: note = Description of Artificial Sequence: Synthetic oligonucleotide
  misc_feature 1..20: note = Target: ANGPTL4; (+) strand; PAM type: NRG; PAM sequence: TGG
  source 1..20: mol_type = other DNA
gagctgggaaggcgaacagc

SEQ ID NO: 11267 - DNA, 20 bp, synthetic construct
  misc_feature 1..20: note = Description of Artificial Sequence: Synthetic oligonucleotide
  misc_feature 1..20: note = Target: ANGPTL4; (+) strand; PAM type: NRG; PAM sequence: TGG
  source 1..20: mol_type = other DNA
aggcgaacagctggcattca

SEQ ID NO: 11268 - DNA, 20 bp, synthetic construct
  misc_feature 1..20: note = Description of Artificial Sequence: Synthetic oligonucleotide
  misc_feature 1..20: note = Target: ANGPTL4; (+) strand; PAM type: NRG; PAM sequence: AAG
  source 1..20: mol_type = other DNA
cgaacagctggcattcatgg

SEQ ID NO: 11269 - DNA, 20 bp, synthetic construct
  misc_feature 1..20: note = Description of Artificial Sequence: Synthetic oligonucleotide
  misc_feature 1..20: note = Target: ANGPTL4; (+) strand; PAM type: NRG; PAM sequence: TGG
  source 1..20: mol_type = other DNA
ggcattcatggaagccacac

SEQ ID NO: 11270 - DNA, 20 bp, synthetic construct
  misc_feature 1..20: note = Description of Artificial Sequence: Synthetic oligonucleotide
  misc_feature 1..20: note = Target: ANGPTL4; (+) strand; PAM type: NRG; PAM sequence: TGG
  source 1..20: mol_type = other DNA
attcatggaagccacactgg

SEQ ID NO: 11271 - DNA, 20 bp, synthetic construct
  misc_feature 1..20: note = Description of Artificial Sequence: Synthetic oligonucleotide
  misc_feature 1..20: note = Target: ANGPTL4; (+) strand; PAM type: NRG; PAM sequence: TGG
  source 1..20: mol_type = other DNA
tggaagccacactggtggtt

SEQ ID NO: 11272 - DNA, 20 bp, synthetic construct
  misc_feature 1..20: note = Description of Artificial Sequence: Synthetic oligonucleotide
  misc_feature 1..20: note = Target: ANGPTL4; (+) strand; PAM type: NRG; PAM sequence: TGG
  source 1..20: mol_type = other DNA
ggccgcgtgcccatccttac

SEQ ID NO: 11273 - DNA, 20 bp, synthetic construct
  misc_feature 1..20: note = Description of Artificial Sequence: Synthetic oligonucleotide
  misc_feature 1..20: note = Target: ANGPTL4; (+) strand; PAM type: NRG; PAM sequence: TGG
  source 1..20: mol_type = other DNA
gcgtgcccatccttactgga

SEQ ID NO: 11274 - DNA, 20 bp, synthetic construct
  misc_feature 1..20: note = Description of Artificial Sequence: Synthetic oligonucleotide
  misc_feature 1..20: note = Target: ANGPTL4; (+) strand; PAM type: NRG; PAM sequence: GGG
  source 1..20: mol_type = other DNA
cgtgcccatccttactggat

SEQ ID NO: 11275 - DNA, 20 bp, synthetic construct
  misc_feature 1..20: note = Description of Artificial Sequence: Synthetic oligonucleotide
  misc_feature 1..20: note = Target: ANGPTL4; (+) strand; PAM type: NRG; PAM sequence: GAG
  source 1..20: mol_type = other DNA
tgcccatccttactggatgg

SEQ ID NO: 11276 - DNA, 20 bp, synthetic construct
  misc_feature 1..20: note = Description of Artificial Sequence: Synthetic oligonucleotide
  misc_feature 1..20: note = Target: ANGPTL4; (+) strand; PAM type: NRG; PAM sequence: AGG
  source 1..20: mol_type = other DNA
gcccatccttactggatggg

SEQ ID NO: 11277 - DNA, 20 bp, synthetic construct
  misc_feature 1..20: note = Description of Artificial Sequence: Synthetic oligonucleotide
  misc_feature 1..20: note = Target: ANGPTL4; (+) strand; PAM type: NRG; PAM sequence: AAG
  source 1..20: mol_type = other DNA
atccttactggatgggagga

SEQ ID NO: 11278 - DNA, 20 bp, synthetic construct
  misc_feature 1..20: note = Description of Artificial Sequence: Synthetic oligonucleotide
  misc_feature 1..20: note = Target: ANGPTL4; (+) strand; PAM type: NRG; PAM sequence: TAG
  source 1..20: mol_type = other DNA
cttactggatgggaggaaag

SEQ ID NO: 11279 - DNA, 20 bp, synthetic construct
  misc_feature 1..20: note = Description of Artificial Sequence: Synthetic oligonucleotide
  misc_feature 1..20: note = Target: ANGPTL4; (+) strand; PAM type: NRG; PAM sequence: AGG
  source 1..20: mol_type = other DNA
ttactggatgggaggaaagt

SEQ ID NO: 11280 - DNA, 20 bp, synthetic construct
  misc_feature 1..20: note = Description of Artificial Sequence: Synthetic oligonucleotide
  misc_feature 1..20: note = Target: ANGPTL4; (+) strand; PAM type: NRG; PAM sequence: GGG
  source 1..20: mol_type = other DNA
tactggatgggaggaaagta

SEQ ID NO: 11281 - DNA, 20 bp, synthetic construct
  misc_feature 1..20: note = Description of Artificial Sequence: Synthetic oligonucleotide
  misc_feature 1..20: note = Target: ANGPTL4; (+) strand; PAM type: NRG; PAM sequence: GGG
  source 1..20: mol_type = other DNA
actggatgggaggaaagtag

SEQ ID NO: 11282 - DNA, 20 bp, synthetic construct
  misc_feature 1..20: note = Description of Artificial Sequence: Synthetic oligonucleotide
  misc_feature 1..20: note = Target: ANGPTL4; (+) strand; PAM type: NRG; PAM sequence: AAG
  source 1..20: mol_type = other DNA
gatgggaggaaagtagggga

SEQ ID NO: 11283 - DNA, 20 bp, synthetic construct
  misc_feature 1..20: note = Description of Artificial Sequence: Synthetic oligonucleotide
  misc_feature 1..20: note = Target: ANGPTL4; (+) strand; PAM type: NRG; PAM sequence: AGG
  source 1..20: mol_type = other DNA
atgggaggaaagtaggggaa

SEQ ID NO: 11284 - DNA, 20 bp, synthetic construct
  misc_feature 1..20: note = Description of Artificial Sequence: Synthetic oligonucleotide
  misc_feature 1..20: note = Target: ANGPTL4; (+) strand; PAM type: NRG; PAM sequence: GGG
  source 1..20: mol_type = other DNA
tgggaggaaagtaggggaaa

SEQ ID NO: 11285 - DNA, 20 bp, synthetic construct
  misc_feature 1..20: note = Description of Artificial Sequence: Synthetic oligonucleotide
  misc_feature 1..20: note = Target: ANGPTL4; (+) strand; PAM type: NRG; PAM sequence: GGG
  source 1..20: mol_type = other DNA
gggaggaaagtaggggaaag

SEQ ID NO: 11286 - DNA, 20 bp, synthetic construct
  misc_feature 1..20: note = Description of Artificial Sequence: Synthetic oligonucleotide
  misc_feature 1..20: note = Target: ANGPTL4; (+) strand; PAM type: NRG; PAM sequence: GAG
  source 1..20: mol_type = other DNA
gaggaaagtaggggaaaggg

SEQ ID NO: 11287 - DNA, 20 bp, synthetic construct
  misc_feature 1..20: note = Description of Artificial Sequence: Synthetic oligonucleotide
  misc_feature 1..20: note = Target: ANGPTL4; (+) strand; PAM type: NRG; PAM sequence: GAG
  source 1..20: mol_type = other DNA
aggggaaaggggagatgcct

SEQ ID NO: 11288 - DNA, 20 bp, synthetic construct
  misc_feature 1..20: note = Description of Artificial Sequence: Synthetic oligonucleotide
  misc_feature 1..20: note = Target: ANGPTL4; (+) strand; PAM type: NRG; PAM sequence: AGG
  source 1..20: mol_type = other DNA
ggggaaaggggagatgcctg

SEQ ID NO: 11289 - DNA, 20 bp, synthetic construct
  misc_feature 1..20: note = Description of Artificial Sequence: Synthetic oligonucleotide
  misc_feature 1..20: note = Target: ANGPTL4; (+) strand; PAM type: NRG; PAM sequence: GGG
  source 1..20: mol_type = other DNA
gggaaaggggagatgcctga

SEQ ID NO: 11290 - DNA, 20 bp, synthetic construct
  misc_feature 1..20: note = Description of Artificial Sequence: Synthetic oligonucleotide
  misc_feature 1..20: note = Target: ANGPTL4; (+) strand; PAM type: NRG; PAM sequence: GGG
  source 1..20: mol_type = other DNA
ggaaaggggagatgcctgag

SEQ ID NO: 11291 - DNA, 20 bp, synthetic construct
  misc_feature 1..20: note = Description of Artificial Sequence: Synthetic oligonucleotide
  misc_feature 1..20: note = Target: ANGPTL4; (+) strand; PAM type: NRG; PAM sequence: CGG
  source 1..20: mol_type = other DNA
aggggagatgcctgaggggc

SEQ ID NO: 11292 - DNA, 20 bp, synthetic construct
  misc_feature 1..20: note = Description of Artificial Sequence: Synthetic oligonucleotide
  misc_feature 1..20: note = Target: ANGPTL4; (+) strand; PAM type: NRG; PAM sequence: AAG
  source 1..20: mol_type = other DNA
gagatgcctgaggggccgga

SEQ ID NO: 11293 - DNA, 20 bp, synthetic construct
  misc_feature 1..20: note = Description of Artificial Sequence: Synthetic oligonucleotide
  misc_feature 1..20: note = Target: ANGPTL4; (+) strand; PAM type: NRG; PAM sequence: TGG
  source 1..20: mol_type = other DNA
ggggccggaaagcgtcttcc

SEQ ID NO: 11294 - DNA, 20 bp, synthetic construct
  misc_feature 1..20: note = Description of Artificial Sequence: Synthetic oligonucleotide
  misc_feature 1..20: note = Target: ANGPTL4; (+) strand; PAM type: NRG; PAM sequence: TGG
  source 1..20: mol_type = other DNA
aagcgtcttcctggtcactc

SEQ ID NO: 11295 - DNA, 20 bp, synthetic construct
  misc_feature 1..20: note = Description of Artificial Sequence: Synthetic oligonucleotide
  misc_feature 1..20: note = Target: ANGPTL4; (+) strand; PAM type: NRG; PAM sequence: GGG
  source 1..20: mol_type = other DNA
agcgtcttcctggtcactct

SEQ ID NO: 11296 - DNA, 20 bp, synthetic construct
  misc_feature 1..20: note = Description of Artificial Sequence: Synthetic oligonucleotide
  misc_feature 1..20: note = Target: ANGPTL4; (+) strand; PAM type: NRG; PAM sequence: CAG
  source 1..20: mol_type = other DNA
ccgcccccacccccaccgtg

SEQ ID NO: 11297 - DNA, 20 bp, synthetic construct
  misc_feature 1..20: note = Description of Artificial Sequence: Synthetic oligonucleotide
  misc_feature 1..20: note = Target: ANGPTL4; (+) strand; PAM type: NRG; PAM sequence: CGG
  source 1..20: mol_type = other DNA
cgacctttcccctacttttc

SEQ ID NO: 11298 - DNA, 20 bp, synthetic construct
  misc_feature 1..20: note = Description of Artificial Sequence: Synthetic oligonucleotide
  misc_feature 1..20: note = Target: ANGPTL4; (+) strand; PAM type: NRG; PAM sequence: TGG
  source 1..20: mol_type = other DNA
ctttcccctacttttccggc

SEQ ID NO: 11299 - DNA, 20 bp, synthetic construct
  misc_feature 1..20: note = Description of Artificial Sequence: Synthetic oligonucleotide
  misc_feature 1..20: note = Target: ANGPTL4; (+) strand; PAM type: NRG; PAM sequence: GGG
  source 1..20: mol_type = other DNA
tttcccctacttttccggct

SEQ ID NO: 11300 - DNA, 20 bp, synthetic construct
  misc_feature 1..20: note = Description of Artificial Sequence: Synthetic oligonucleotide
  misc_feature 1..20: note = Target: ANGPTL4; (+) strand; PAM type: NRG; PAM sequence: TGG
  source 1..20: mol_type = other DNA
ccctacttttccggctgggc

SEQ ID NO: 11301 - DNA, 20 bp, synthetic construct
  misc_feature 1..20: note = Description of Artificial Sequence: Synthetic oligonucleotide
  misc_feature 1..20: note = Target: ANGPTL4; (+) strand; PAM type: NRG; PAM sequence: GGG
  source 1..20: mol_type = other DNA
cctacttttccggctgggct

SEQ ID NO: 11302 - DNA, 20 bp, synthetic construct
  misc_feature 1..20: note = Description of Artificial Sequence: Synthetic oligonucleotide
  misc_feature 1..20: note = Target: ANGPTL4; (+) strand; PAM type: NRG; PAM sequence: GGG
  source 1..20: mol_type = other DNA
ctacttttccggctgggctg

SEQ ID NO: 11303 - DNA, 20 bp, synthetic construct
  misc_feature 1..20: note = Description of Artificial Sequence: Synthetic oligonucleotide
  misc_feature 1..20: note = Target: ANGPTL4; (+) strand; PAM type: NRG; PAM sequence: GGG
  source 1..20: mol_type = other DNA
tacttttccggctgggctgg

SEQ ID NO: 11304 - DNA, 20 bp, synthetic construct
  misc_feature 1..20: note = Description of Artificial Sequence: Synthetic oligonucleotide
  misc_feature 1..20: note = Target: ANGPTL4; (+) strand; PAM type: NRG; PAM sequence: CGG
  source 1..20: mol_type = other DNA
ttttccggctgggctggggg

SEQ ID NO: 11305 - DNA, 20 bp, synthetic construct
  misc_feature 1..20: note = Description of Artificial Sequence: Synthetic oligonucleotide
  misc_feature 1..20: note = Target: ANGPTL4; (+) strand; PAM type: NRG; PAM sequence: CAG
  source 1..20: mol_type = other DNA
gggctgggggcggttcctcc

SEQ ID NO: 11306 - DNA, 20 bp, synthetic construct
  misc_feature 1..20: note = Description of Artificial Sequence: Synthetic oligonucleotide
  misc_feature 1..20: note = Target: ANGPTL4; (+) strand; PAM type: NRG; PAM sequence: TGG
  source 1..20: mol_type = other DNA
gggggcggttcctcccagtc

SEQ ID NO: 11307 - DNA, 20 bp, synthetic construct
  misc_feature 1..20: note = Description of Artificial Sequence: Synthetic oligonucleotide
  misc_feature 1..20: note = Target: ANGPTL4; (+) strand; PAM type: NRG; PAM sequence: GAG
  source 1..20: mol_type = other DNA
gggcggttcctcccagtctg

SEQ ID NO: 11308 - DNA, 20 bp, synthetic construct
  misc_feature 1..20: note = Description of Artificial Sequence: Synthetic oligonucleotide
  misc_feature 1..20: note = Target: ANGPTL4; (+) strand; PAM type: NRG; PAM sequence: GAG
  source 1..20: mol_type = other DNA
cctcccagtctggagcgtct

SEQ ID NO: 11309 - DNA, 20 bp, synthetic construct
  misc_feature 1..20: note = Description of Artificial Sequence: Synthetic oligonucleotide
  misc_feature 1..20: note = Target: ANGPTL4; (+) strand; PAM type: NRG; PAM sequence: CAG
  source 1..20: mol_type = other DNA
gtctggagcgtctgagcctc

SEQ ID NO: 11310 - DNA, 20 bp, synthetic construct
  misc_feature 1..20: note = Description of Artificial Sequence: Synthetic oligonucleotide
  misc_feature 1..20: note = Target: ANGPTL4; (+) strand; PAM type: NRG; PAM sequence: TAG
  source 1..20: mol_type = other DNA
aaccctgcctcctctccctc

SEQ ID NO: 11311 - DNA, 20 bp, synthetic construct
  misc_feature 1..20: note = Description of Artificial Sequence: Synthetic oligonucleotide
  misc_feature 1..20: note = Target: ANGPTL4; (+) strand; PAM type: NRG; PAM sequence: AGG
  source 1..20: mol_type = other DNA
accctgcctcctctccctct

SEQ ID NO: 11312 - DNA, 20 bp, synthetic construct
  misc_feature 1..20: note = Description of Artificial Sequence: Synthetic oligonucleotide
  misc_feature 1..20: note = Target: ANGPTL4; (+) strand; PAM type: NRG; PAM sequence: GAG
  source 1..20: mol_type = other DNA
cctgcctcctctccctctag

SEQ ID NO: 11313 - DNA, 20 bp, synthetic construct
  misc_feature 1..20: note = Description of Artificial Sequence: Synthetic oligonucleotide
  misc_feature 1..20: note = Target: ANGPTL4; (+) strand; PAM type: NRG; PAM sequence: TGG
  source 1..20: mol_type = other DNA
cctcctctccctctaggagc

SEQ ID NO: 11314 - DNA, 20 bp, synthetic construct
  misc_feature 1..20: note = Description of Artificial Sequence: Synthetic oligonucleotide
  misc_feature 1..20: note = Target: ANGPTL4; (+) strand; PAM type: NRG; PAM sequence: GGG
  source 1..20: mol_type = other DNA
ctcctctccctctaggagct

SEQ ID NO: 11315 - DNA, 20 bp, synthetic construct
  misc_feature 1..20: note = Description of Artificial Sequence: Synthetic oligonucleotide
  misc_feature 1..20: note = Target: ANGPTL4; (+) strand; PAM type: NRG; PAM sequence: CAG
  source 1..20: mol_type = other DNA
ccctctaggagctgggaccc

SEQ ID NO: 11316 - DNA, 20 bp, synthetic construct
  misc_feature 1..20: note = Description of Artificial Sequence: Synthetic oligonucleotide
  misc_feature 1..20: note = Target: ANGPTL4; (+) strand; PAM type: NRG; PAM sequence: AGG
  source 1..20: mol_type = other DNA
cctctaggagctgggacccc

SEQ ID NO: 11317 - DNA, 20 bp, synthetic construct
  misc_feature 1..20: note = Description of Artificial Sequence: Synthetic oligonucleotide
  misc_feature 1..20: note = Target: ANGPTL4; (+) strand; PAM type: NRG; PAM sequence: CAG
  source 1..20: mol_type = other DNA
ctaggagctgggaccccagg

SEQ ID NO: 11318 - DNA, 20 bp, synthetic construct
  misc_feature 1..20: note = Description of Artificial Sequence: Synthetic oligonucleotide
  misc_feature 1..20: note = Target: ANGPTL4; (+) strand; PAM type: NRG; PAM sequence: GAG
  source 1..20: mol_type = other DNA
aggagctgggaccccaggca

SEQ ID NO: 11319 - DNA, 20 bp, synthetic construct
  misc_feature 1..20: note = Description of Artificial Sequence: Synthetic oligonucleotide
  misc_feature 1..20: note = Target: ANGPTL4; (+) strand; PAM type: NRG; PAM sequence: GAG
  source 1..20: mol_type = other DNA
ggaccccaggcagagcctct

SEQ ID NO: 11320 - DNA, 20 bp, synthetic construct
  misc_feature 1..20: note = Description of Artificial Sequence: Synthetic oligonucleotide
  misc_feature 1..20: note = Target: ANGPTL4; (+) strand; PAM type: NRG; PAM sequence: CAG
  source 1..20: mol_type = other DNA
gcctctgagatgctcctgct

SEQ ID NO: 11321 - DNA, 20 bp, synthetic construct
  misc_feature 1..20: note = Description of Artificial Sequence: Synthetic oligonucleotide
  misc_feature 1..20: note = Target: ANGPTL4; (+) strand; PAM type: NRG; PAM sequence: CAG
  source 1..20: mol_type = other DNA
tgagatgctcctgctcagca

SEQ ID NO: 11322 - DNA, 20 bp, synthetic construct
  misc_feature 1..20: note = Description of Artificial Sequence: Synthetic oligonucleotide
  misc_feature 1..20: note = Target: ANGPTL4; (+) strand; PAM type: NRG; PAM sequence: TGG
  source 1..20: mol_type = other DNA
cagcacagttcttcccgttc

SEQ ID NO: 11323 - DNA, 20 bp, synthetic construct
  misc_feature 1..20: note = Description of Artificial Sequence: Synthetic oligonucleotide
  misc_feature 1..20: note = Target: ANGPTL4; (+) strand; PAM type: NRG; PAM sequence: AAG
  source 1..20: mol_type = other DNA
cattcattcattcatttgtc

SEQ ID NO: 11324 - DNA, 20 bp, synthetic construct
  misc_feature 1..20: note = Description of Artificial Sequence: Synthetic oligonucleotide
  misc_feature 1..20: note = Target: ANGPTL4; (+) strand; PAM type: NRG; PAM sequence: GAG
  source 1..20: mol_type = other DNA
gactgttttgtttgcttttt

SEQ ID NO: 11325 - DNA, 20 bp, synthetic construct
  misc_feature 1..20: note = Description of Artificial Sequence: Synthetic oligonucleotide
  misc_feature 1..20: note = Target: ANGPTL4; (+) strand; PAM type: NRG; PAM sequence: CGG
  source 1..20: mol_type = other DNA
gttttgtttgctttttgaga

SEQ ID NO: 11326 - DNA, 20 bp, synthetic construct
  misc_feature 1..20: note = Description of Artificial Sequence: Synthetic oligonucleotide
  misc_feature 1..20: note = Target: ANGPTL4; (+) strand; PAM type: NRG; PAM sequence: GAG
  source 1..20: mol_type = other DNA
tttgtttgctttttgagacg

SEQ ID NO: 11327 - DNA, 20 bp, synthetic construct
  misc_feature 1..20: note = Description of Artificial Sequence: Synthetic oligonucleotide
  misc_feature 1..20: note = Target: ANGPTL4; (+) strand; PAM type: NRG; PAM sequence: CAG
  source 1..20: mol_type = other DNA
cggagtctcgctctgttgtc

SEQ ID NO: 11328 - DNA, 20 bp, synthetic construct
  misc_feature 1..20: note = Description of Artificial Sequence: Synthetic oligonucleotide
  misc_feature 1..20: note = Target: ANGPTL4; (+) strand; PAM type: NRG; PAM sequence: AGG
  source 1..20: mol_type = other DNA
ggagtctcgctctgttgtcc

SEQ ID NO: 11329 - DNA, 20 bp, synthetic construct
  misc_feature 1..20: note = Description of Artificial Sequence: Synthetic oligonucleotide
  misc_feature 1..20: note = Target: ANGPTL4; (+) strand; PAM type: NRG; PAM sequence: TGG
  source 1..20: mol_type = other DNA
tctcgctctgttgtccaggc

SEQ ID NO: 11330 - DNA, 20 bp, synthetic construct
  misc_feature 1..20: note = Description of Artificial Sequence: Synthetic oligonucleotide
  misc_feature 1..20: note = Target: ANGPTL4; (+) strand; PAM type: NRG; PAM sequence: GAG
  source 1..20: mol_type = other DNA
tcgctctgttgtccaggctg

SEQ ID NO: 11331 - DNA, 20 bp, synthetic construct
  misc_feature 1..20: note = Description of Artificial Sequence: Synthetic oligonucleotide
  misc_feature 1..20: note = Target: ANGPTL4; (+) strand; PAM type: NRG; PAM sequence: CAG
  source 1..20: mol_type = other DNA
ctgttgtccaggctggagtg

SEQ ID NO: 11332 - DNA, 20 bp, synthetic construct
  misc_feature 1..20: note = Description of Artificial Sequence: Synthetic oligonucleotide
  misc_feature 1..20: note = Target: ANGPTL4; (+) strand; PAM type: NRG; PAM sequence: TGG
  source 1..20: mol_type = other DNA
ttgtccaggctggagtgcag

SEQ ID NO: 11333 - DNA, 20 bp, synthetic construct
  misc_feature 1..20: note = Description of Artificial Sequence: Synthetic oligonucleotide
  misc_feature 1..20: note = Target: ANGPTL4; (+) strand; PAM type: NRG; PAM sequence: CAG
  source 1..20: mol_type = other DNA
ggagtgcagtggcgcaatct

SEQ ID NO: 11334 - DNA, 20 bp, synthetic construct
  misc_feature 1..20: note = Description of Artificial Sequence: Synthetic oligonucleotide
  misc_feature 1..20: note = Target: ANGPTL4; (+) strand; PAM type: NRG; PAM sequence: TGG
  source 1..20: mol_type = other DNA
ctgcaacctctgcctcccac

SEQ ID NO: 11335 - DNA, 20 bp, synthetic construct
  misc_feature 1..20: note = Description of Artificial Sequence: Synthetic oligonucleotide
  misc_feature 1..20: note = Target: ANGPTL4; (+) strand; PAM type: NRG; PAM sequence: GGG
  source 1..20: mol_type = other DNA
tgcaacctctgcctcccact

SEQ ID NO: 11336 - DNA, 20 bp, synthetic construct
  misc_feature 1..20: note = Description of Artificial Sequence: Synthetic oligonucleotide
  misc_feature 1..20: note = Target: ANGPTL4; (+) strand; PAM type: NRG; PAM sequence: AAG
  source 1..20: mol_type = other DNA
ctctgcctcccactgggttc

SEQ ID NO: 11337 - DNA, 20 bp, synthetic construct
  misc_feature 1..20: note = Description of Artificial Sequence: Synthetic oligonucleotide
  misc_feature 1..20: note = Target: ANGPTL4; (+) strand; PAM type: NRG; PAM sequence: CAG
  source 1..20: mol_type = other DNA
ttcaagtgattctcctgcct

SEQ ID NO: 11338 - DNA, 20 bp, synthetic construct
  misc_feature 1..20: note = Description of Artificial Sequence: Synthetic oligonucleotide
  misc_feature 1..20: note = Target: ANGPTL4; (+) strand; PAM type: NRG; PAM sequence: AAG
  source 1..20: mol_type = other DNA
ttctcctgcctcagcctctc

SEQ ID NO: 11339 - DNA, 20 bp, synthetic construct
  misc_feature 1..20: note = Description of Artificial Sequence: Synthetic oligonucleotide
  misc_feature 1..20: note = Target: ANGPTL4; (+) strand; PAM type: NRG; PAM sequence: TAG
  source 1..20: mol_type = other DNA
tcctgcctcagcctctcaag

SEQ ID NO: 11340 - DNA, 20 bp, synthetic construct
  misc_feature 1..20: note = Description of Artificial Sequence: Synthetic oligonucleotide
  misc_feature 1..20: note = Target: ANGPTL4; (+) strand; PAM type: NRG; PAM sequence: TGG
  source 1..20: mol_type = other DNA
gcctcagcctctcaagtaga

SEQ ID NO: 11341 - DNA, 20 bp, synthetic construct
  misc_feature 1..20: note = Description of Artificial Sequence: Synthetic oligonucleotide
  misc_feature 1..20: note = Target: ANGPTL4; (+) strand; PAM type: NRG; PAM sequence: GGG
  source 1..20: mol_type = other DNA
cctcagcctctcaagtagat

SEQ ID NO: 11342 - DNA, 20 bp, synthetic construct
  misc_feature 1..20: note = Description of Artificial Sequence: Synthetic oligonucleotide
  misc_feature 1..20: note = Target: ANGPTL4; (+) strand; PAM type: NRG; PAM sequence: TAG
  source 1..20: mol_type = other DNA
ctctcaagtagatgggatta

SEQ ID NO: 11343 - DNA, 20 bp, synthetic construct
  misc_feature 1..20: note = Description of Artificial Sequence: Synthetic oligonucleotide
  misc_feature 1..20: note = Target: ANGPTL4; (+) strand; PAM type: NRG; PAM sequence: AGG
  source 1..20: mol_type = other DNA
tctcaagtagatgggattat

SEQ ID NO: 11344 - DNA, 20 bp, synthetic construct
  misc_feature 1..20: note = Description of Artificial Sequence: Synthetic oligonucleotide
  misc_feature 1..20: note = Target: ANGPTL4; (+) strand; PAM type: NRG; PAM sequence: CAG
  source 1..20: mol_type = other DNA
gcgcctaccgccaccacgcc

SEQ ID NO: 11345 - DNA, 20 bp, synthetic construct
  misc_feature 1..20: note = Description of Artificial Sequence: Synthetic oligonucleotide
  misc_feature 1..20: note = Target: ANGPTL4; (+) strand; PAM type: NRG; PAM sequence: AAG
  source 1..20: mol_type = other DNA
ctaatttttattcatttatc

SEQ ID NO: 11346 - DNA, 20 bp, synthetic construct
  misc_feature 1..20: note = Description of Artificial Sequence: Synthetic oligonucleotide
  misc_feature 1..20: note = Target: ANGPTL4; (+) strand; PAM type: NRG; PAM sequence: GAG
  source 1..20: mol_type = other DNA
atcaagtctttttttttttt

SEQ ID NO: 11347 - DNA, 20 bp, synthetic construct
  misc_feature 1..20: note = Description of Artificial Sequence: Synthetic oligonucleotide
  misc_feature 1..20: note = Target: ANGPTL4; (+) strand; PAM type: NRG; PAM sequence: CAG
  source 1..20: mol_type = other DNA
agtcttttttttttttgaga

SEQ ID NO: 11348 - DNA, 20 bp, synthetic construct
  misc_feature 1..20: note = Description of Artificial Sequence: Synthetic oligonucleotide
  misc_feature 1..20: note = Target: ANGPTL4; (+) strand; PAM type: NRG; PAM sequence: GAG
  source 1..20: mol_type = other DNA
tcttttttttttttgagaca

SEQ ID NO: 11349 - DNA, 20 bp, synthetic construct
  misc_feature 1..20: note = Description of Artificial Sequence: Synthetic oligonucleotide
  misc_feature 1..20: note = Target: ANGPTL4; (+) strand; PAM type: NRG; PAM sequence: CAG
  source 1..20: mol_type = other DNA
cagagtctcactctgtcacc

SEQ ID NO: 11350 - DNA, 20 bp, synthetic construct
  misc_feature 1..20: note = Description of Artificial Sequence: Synthetic oligonucleotide
  misc_feature 1..20: note = Target: ANGPTL4; (+) strand; PAM type: NRG; PAM sequence: AGG
  source 1..20: mol_type = other DNA
agagtctcactctgtcaccc

SEQ ID NO: 11351 - DNA, 20 bp, synthetic construct
  misc_feature 1..20: note = Description of Artificial Sequence: Synthetic oligonucleotide
  misc_feature 1..20: note = Target: ANGPTL4; (+) strand; PAM type: NRG; PAM sequence: TGG
  source 1..20: mol_type = other DNA
tctcactctgtcacccaggt

SEQ ID NO: 11352 - DNA, 20 bp, synthetic construct
  misc_feature 1..20: note = Description of Artificial Sequence: Synthetic oligonucleotide
  misc_feature 1..20: note = Target: ANGPTL4; (+) strand; PAM type: NRG; PAM sequence: GAG
  source 1..20: mol_type = other DNA
tcactctgtcacccaggttg

SEQ ID NO: 11353 - DNA, 20 bp, synthetic construct
  misc_feature 1..20: note = Description of Artificial Sequence: Synthetic oligonucleotide
  misc_feature 1..20: note = Target: ANGPTL4; (+) strand; PAM type: NRG; PAM sequence: TGG
  source 1..20: mol_type = other DNA
tcacccaggttggagtgcaa

SEQ ID NO: 11354 - DNA, 20 bp, synthetic construct
  misc_feature 1..20: note = Description of Artificial Sequence: Synthetic oligonucleotide
  misc_feature 1..20: note = Target: ANGPTL4; (+) strand; PAM type: NRG; PAM sequence: CAG
  source 1..20: mol_type = other DNA
ggagtgcaatggttcaacct

SEQ ID NO: 11355 - DNA, 20 bp, synthetic construct
  misc_feature 1..20: note = Description of Artificial Sequence: Synthetic oligonucleotide
  misc_feature 1..20: note = Target: ANGPTL4; (+) strand; PAM type: NRG; PAM sequence: CGG
  source 1..20: mol_type = other DNA
tgactgcaacctctgcctcc

SEQ ID NO: 11356 - DNA, 20 bp, synthetic construct
  misc_feature 1..20: note = Description of Artificial Sequence: Synthetic oligonucleotide
  misc_feature 1..20: note = Target: ANGPTL4; (+) strand; PAM type: NRG; PAM sequence: GGG
  source 1..20: mol_type = other DNA
gactgcaacctctgcctccc

SEQ ID NO: 11357 - DNA, 20 bp, synthetic construct
  misc_feature 1..20: note = Description of Artificial Sequence: Synthetic oligonucleotide
  misc_feature 1..20: note = Target: ANGPTL4; (+) strand; PAM type: NRG; PAM sequence: AAG
  source 1..20: mol_type = other DNA
aacctctgcctcccgggttc

SEQ ID NO: 11358 - DNA, 20 bp, synthetic construct
  misc_feature 1..20: note = Description of Artificial Sequence: Synthetic oligonucleotide
  misc_feature 1..20: note = Target: ANGPTL4; (+) strand; PAM type: NRG; PAM sequence: AAG
  source 1..20: mol_type = other DNA
ttctcctgcctctgcctcct

SEQ ID NO: 11359 - DNA, 20 bp, synthetic construct
  misc_feature 1..20: note = Description of Artificial Sequence: Synthetic oligonucleotide
  misc_feature 1..20: note = Target: ANGPTL4; (+) strand; PAM type: NRG; PAM sequence: AGG
  source 1..20: mol_type = other DNA
tctcctgcctctgcctccta

SEQ ID NO: 11360 - DNA, 20 bp, synthetic construct
  misc_feature 1..20: note = Description of Artificial Sequence: Synthetic oligonucleotide
  misc_feature 1..20: note = Target: ANGPTL4; (+) strand; PAM type: NRG; PAM sequence: GAG
  source 1..20: mol_type = other DNA
tcctgcctctgcctcctaag

SEQ ID NO: 11361 - DNA, 20 bp, synthetic construct
  misc_feature 1..20: note = Description of Artificial Sequence: Synthetic oligonucleotide
  misc_feature 1..20: note = Target: ANGPTL4; (+) strand; PAM type: NRG; PAM sequence: TGG
  source 1..20: mol_type = other DNA
gcctctgcctcctaaggagc

SEQ ID NO: 11362 - DNA, 20 bp, synthetic construct
  misc_feature 1..20: note = Description of Artificial Sequence: Synthetic oligonucleotide
  misc_feature 1..20: note = Target: ANGPTL4; (+) strand; PAM type: NRG; PAM sequence: GGG
  source 1..20: mol_type = other DNA
cctctgcctcctaaggagct

SEQ ID NO: 11363 - DNA, 20 bp, synthetic construct
  misc_feature 1..20: note = Description of Artificial Sequence: Synthetic oligonucleotide
  misc_feature 1..20: note = Target: ANGPTL4; (+) strand; PAM type: NRG; PAM sequence: TGG
  source 1..20: mol_type = other DNA
tcctaaggagctgggattac

SEQ ID NO: 11364 - DNA, 20 bp, synthetic construct
  misc_feature 1..20: note = Description of Artificial Sequence: Synthetic oligonucleotide
  misc_feature 1..20: note = Target: ANGPTL4; (+) strand; PAM type: NRG; PAM sequence: CAG
  source 1..20: mol_type = other DNA
ctggcgtccaccatcacacc

SEQ ID NO: 11365 - DNA, 20 bp, synthetic construct
  misc_feature 1..20: note = Description of Artificial Sequence: Synthetic oligonucleotide
  misc_feature 1..20: note = Target: ANGPTL4; (+) strand; PAM type: NRG; PAM sequence: TAG
  source 1..20: mol_type = other DNA
ctaatctttgtatgttttac

SEQ ID NO: 11366 - DNA, 20 bp, synthetic construct
  misc_feature 1..20: note = Description of Artificial Sequence: Synthetic oligonucleotide
  misc_feature 1..20: note = Target: ANGPTL4; (+) strand; PAM type: NRG; PAM sequence: GAG
  source 1..20: mol_type = other DNA
aatctttgtatgttttacta

SEQ ID NO: 11367 - DNA, 20 bp, synthetic construct
  misc_feature 1..20: note = Description of Artificial Sequence: Synthetic oligonucleotide
  misc_feature 1..20: note = Target: ANGPTL4; (+) strand; PAM type: NRG; PAM sequence: TGG
  source 1..20: mol_type = other DNA
tttgtatgttttactagaga

SEQ ID NO: 11368 - DNA, 20 bp, synthetic construct
  misc_feature 1..20: note = Description of Artificial Sequence: Synthetic oligonucleotide
  misc_feature 1..20: note = Target: ANGPTL4; (+) strand; PAM type: NRG; PAM sequence: GGG
  source 1..20: mol_type = other DNA
ttgtatgttttactagagat

SEQ ID NO: 11369 - DNA, 20 bp, synthetic construct
  misc_feature 1..20: note = Description of Artificial Sequence: Synthetic oligonucleotide
  misc_feature 1..20: note = Target: ANGPTL4; (+) strand; PAM type: NRG; PAM sequence: GGG
  source 1..20: mol_type = other DNA
tgtatgttttactagagatg

SEQ ID NO: 11370 - DNA, 20 bp, synthetic construct
  misc_feature 1..20: note = Description of Artificial Sequence: Synthetic oligonucleotide
  misc_feature 1..20: note = Target: ANGPTL4; (+) strand; PAM type: NRG; PAM sequence: TGG
  source 1..20: mol_type = other DNA
gttttactagagatggggtt

SEQ ID NO: 11371 - DNA, 20 bp, synthetic construct
  misc_feature 1..20: note = Description of Artificial Sequence: Synthetic oligonucleotide
  misc_feature 1..20: note = Target: ANGPTL4; (+) strand; PAM type: NRG; PAM sequence: CAG
  source 1..20: mol_type = other DNA
tggggtttggccatgttgac

SEQ ID NO: 11372 - DNA, 20 bp, synthetic construct
  misc_feature 1..20: note = Description of Artificial Sequence: Synthetic oligonucleotide
  misc_feature 1..20: note = Target: ANGPTL4; (+) strand; PAM type: NRG; PAM sequence: AGG
  source 1..20: mol_type = other DNA
ggggtttggccatgttgacc

SEQ ID NO: 11373 - DNA, 20 bp, synthetic construct
  misc_feature 1..20: note = Description of Artificial Sequence: Synthetic oligonucleotide
  misc_feature 1..20: note = Target: ANGPTL4; (+) strand; PAM type: NRG; PAM sequence: TGG
  source 1..20: mol_type = other DNA
tttggccatgttgaccaggc

SEQ ID NO: 11374 - DNA, 20 bp, synthetic construct
  misc_feature 1..20: note = Description of Artificial Sequence: Synthetic oligonucleotide
  misc_feature 1..20: note = Target: ANGPTL4; (+) strand; PAM type: NRG; PAM sequence: AAG
  source 1..20: mol_type = other DNA
accgatccgcccgcctccca

SEQ ID NO: 11375 - DNA, 20 bp, synthetic construct
  misc_feature 1..20: note = Description of Artificial Sequence: Synthetic oligonucleotide
  misc_feature 1..20: note = Target: ANGPTL4; (+) strand; PAM type: NRG; PAM sequence: TGG
  source 1..20: mol_type = other DNA
ccgcccgcctcccaaagtgc

SEQ ID NO: 11376 - DNA, 20 bp, synthetic construct
  misc_feature 1..20: note = Description of Artificial Sequence: Synthetic oligonucleotide
  misc_feature 1..20: note = Target: ANGPTL4; (+) strand; PAM type: NRG; PAM sequence: CAG
  source 1..20: mol_type = other DNA
cctcccaaagtgctggatta

SEQ ID NO: 11377 - DNA, 20 bp, synthetic construct
  misc_feature 1..20: note = Description of Artificial Sequence: Synthetic oligonucleotide
  misc_feature 1..20: note = Target: ANGPTL4; (+) strand; PAM type: NRG; PAM sequence: AGG
  source 1..20: mol_type = other DNA
ctcccaaagtgctggattac

SEQ ID NO: 11378 - DNA, 20 bp, synthetic construct
  misc_feature 1..20: note = Description of Artificial Sequence: Synthetic oligonucleotide
  misc_feature 1..20: note = Target: ANGPTL4; (+) strand; PAM type: NRG; PAM sequence: CGG
  source 1..20: mol_type = other DNA
caggcatgaaccactgcgcc

SEQ ID NO: 11379 - DNA, 20 bp, synthetic construct
  misc_feature 1..20: note = Description of Artificial Sequence: Synthetic oligonucleotide
  misc_feature 1..20: note = Target: ANGPTL4; (+) strand; PAM type: NRG; PAM sequence: AAG
  source 1..20: mol_type = other DNA
ctgcgcccggcccattcctc

SEQ ID NO: 11380 - DNA, 20 bp, synthetic construct
  misc_feature 1..20: note = Description of Artificial Sequence: Synthetic oligonucleotide
  misc_feature 1..20: note = Target: ANGPTL4; (+) strand; PAM type: NRG; PAM sequence: GAG
  source 1..20: mol_type = other DNA
ccattcctcaagtctttatt

SEQ ID NO: 11381 - DNA, 20 bp, synthetic construct
  misc_feature 1..20: note = Description of Artificial Sequence: Synthetic oligonucleotide
  misc_feature 1..20: note = Target: ANGPTL4; (+) strand; PAM type: NRG; PAM sequence: CAG
  source 1..20: mol_type = other DNA
ttcctcaagtctttattgag

SEQ ID NO: 11382 - DNA, 20 bp, synthetic construct
  misc_feature 1..20: note = Description of Artificial Sequence: Synthetic oligonucleotide
  misc_feature 1..20: note = Target: ANGPTL4; (+) strand; PAM type: NRG; PAM sequence: TGG
  source 1..20: mol_type = other DNA
attgagcagctgctatgcgc

SEQ ID NO: 11383 - DNA, 20 bp, synthetic construct
  misc_feature 1..20: note = Description of Artificial Sequence: Synthetic oligonucleotide
  misc_feature 1..20: note = Target: ANGPTL4; (+) strand; PAM type: NRG; PAM sequence: GGG
  source 1..20: mol_type = other DNA
ttgagcagctgctatgcgct

SEQ ID NO: 11384 - DNA, 20 bp, synthetic construct
  misc_feature 1..20: note = Description of Artificial Sequence: Synthetic oligonucleotide
  misc_feature 1..20: note = Target: ANGPTL4; (+) strand; PAM type: NRG; PAM sequence: GGG
  source 1..20: mol_type = other DNA
tgagcagctgctatgcgctg

SEQ ID NO: 11385 - DNA, 20 bp, synthetic construct
  misc_feature 1..20: note = Description of Artificial Sequence: Synthetic oligonucleotide
  misc_feature 1..20: note = Target: ANGPTL4; (+) strand; PAM type: NRG; PAM sequence: TGG
  source 1..20: mol_type = other DNA
gctatgcgctggggcctgcg

SEQ ID NO: 11386 - DNA, 20 bp, synthetic construct
  misc_feature 1..20: note = Description of Artificial Sequence: Synthetic oligonucleotide
  misc_feature 1..20: note = Target: ANGPTL4; (+) strand; PAM type: NRG; PAM sequence: TGG
  source 1..20: mol_type = other DNA
gctggggcctgcgtggatgc

SEQ ID NO: 11387 - DNA, 20 bp, synthetic construct
  misc_feature 1..20: note = Description of Artificial Sequence: Synthetic oligonucleotide
  misc_feature 1..20: note = Target: ANGPTL4; (+) strand; PAM type: NRG; PAM sequence: CAG
  source 1..20: mol_type = other DNA
gcctgcgtggatgctggtgc

SEQ ID NO: 11388 - DNA, 20 bp, synthetic construct
  misc_feature 1..20: note = Description of Artificial Sequence: Synthetic oligonucleotide
  misc_feature 1..20: note = Target: ANGPTL4; (+) strand; PAM type: NRG; PAM sequence: AGG
  source 1..20: mol_type = other DNA
cctgcgtggatgctggtgcc

SEQ ID NO: 11389 - DNA, 20 bp, synthetic construct
  misc_feature 1..20: note = Description of Artificial Sequence: Synthetic oligonucleotide
  misc_feature 1..20: note = Target: ANGPTL4; (+) strand; PAM type: NRG; PAM sequence: TGG
  source 1..20: mol_type = other DNA
tggatgctggtgccaggctg

SEQ ID NO: 11390 - DNA, 20 bp, synthetic construct
  misc_feature 1..20: note = Description of Artificial Sequence: Synthetic oligonucleotide
  misc_feature 1..20: note = Target: ANGPTL4; (+) strand; PAM type: NRG; PAM sequence: GGG
  source 1..20: mol_type = other DNA
ggatgctggtgccaggctgt

SEQ ID NO: 11391 - DNA, 20 bp, synthetic construct
  misc_feature 1..20: note = Description of Artificial Sequence: Synthetic oligonucleotide
  misc_feature 1..20: note = Target: ANGPTL4; (+) strand; PAM type: NRG; PAM sequence: CAG
  source 1..20: mol_type = other DNA
tgctggtgccaggctgtggg

SEQ ID NO: 11392 - DNA, 20 bp, synthetic construct
  misc_feature 1..20: note = Description of Artificial Sequence: Synthetic oligonucleotide
  misc_feature 1..20: note = Target: ANGPTL4; (+) strand; PAM type: NRG; PAM sequence: GAG
  source 1..20: mol_type = other DNA
ctggtgccaggctgtgggca

SEQ ID NO: 11393 - DNA, 20 bp, synthetic construct
  misc_feature 1..20: note = Description of Artificial Sequence: Synthetic oligonucleotide
  misc_feature 1..20: note = Target: ANGPTL4; (+) strand; PAM type: NRG; PAM sequence: CAG
  source 1..20: mol_type = other DNA
gcagagctgctccttgtccc

SEQ ID NO: 11394 - DNA, 20 bp, synthetic construct
  misc_feature 1..20: note = Description of Artificial Sequence: Synthetic oligonucleotide
  misc_feature 1..20: note = Target: ANGPTL4; (+) strand; PAM type: NRG; PAM sequence: TGG
  source 1..20: mol_type = other DNA
gctccttgtccccagcctca

SEQ ID NO: 11395 - DNA, 20 bp, synthetic construct
  misc_feature 1..20: note = Description of Artificial Sequence: Synthetic oligonucleotide
  misc_feature 1..20: note = Target: ANGPTL4; (+) strand; PAM type: NRG; PAM sequence: GAG
  source 1..20: mol_type = other DNA
tccttgtccccagcctcatg

SEQ ID NO: 11396 - DNA, 20 bp, synthetic construct
  misc_feature 1..20: note = Description of Artificial Sequence: Synthetic oligonucleotide
  misc_feature 1..20: note = Target: ANGPTL4; (+) strand; PAM type: NRG; PAM sequence: GAG
  source 1..20: mol_type = other DNA
agcctcatggagcctccatt

SEQ ID NO: 11397 - DNA, 20 bp, synthetic construct
  misc_feature 1..20: note = Description of Artificial Sequence: Synthetic oligonucleotide
  misc_feature 1..20: note = Target: ANGPTL4; (+) strand; PAM type: NRG; PAM sequence: CAG
  source 1..20: mol_type = other DNA
tcatggagcctccattgagt

SEQ ID NO: 11398 - DNA, 20 bp, synthetic construct
  misc_feature 1..20: note = Description of Artificial Sequence: Synthetic oligonucleotide
  misc_feature 1..20: note = Target: ANGPTL4; (+) strand; PAM type: NRG; PAM sequence: GAG
  source 1..20: mol_type = other DNA
atggagcctccattgagtca

SEQ ID NO: 11399 - DNA, 20 bp, synthetic construct
  misc_feature 1..20: note = Description of Artificial Sequence: Synthetic oligonucleotide
  misc_feature 1..20: note = Target: ANGPTL4; (+) strand; PAM type: NRG; PAM sequence: AGG
  source 1..20: mol_type = other DNA
tggagcctccattgagtcag

SEQ ID NO: 11400 - DNA, 20 bp, synthetic construct
  misc_feature 1..20: note = Description of Artificial Sequence: Synthetic oligonucleotide
  misc_feature 1..20: note = Target: ANGPTL4; (+) strand; PAM type: NRG; PAM sequence: GAG
  source 1..20: mol_type = other DNA
gagcctccattgagtcagag

SEQ ID NO: 11401 - DNA, 20 bp, synthetic construct
  misc_feature 1..20: note = Description of Artificial Sequence: Synthetic oligonucleotide
  misc_feature 1..20: note = Target: ANGPTL4; (+) strand; PAM type: NRG; PAM sequence: GAG
  source 1..20: mol_type = other DNA
gcctccattgagtcagagga

SEQ ID NO: 11402 - DNA, 20 bp, synthetic construct
  misc_feature 1..20: note = Description of Artificial Sequence: Synthetic oligonucleotide
  misc_feature 1..20: note = Target: ANGPTL4; (+) strand; PAM type: NRG; PAM sequence: TAG
  source 1..20: mol_type = other DNA
tgagtcagaggagagaccat

SEQ ID NO: 11403 - DNA, 20 bp, synthetic construct
  misc_feature 1..20: note = Description of Artificial Sequence: Synthetic oligonucleotide
  misc_feature 1..20: note = Target: ANGPTL4; (+) strand; PAM type: NRG; PAM sequence: CAG
  source 1..20: mol_type = other DNA
gagagaccattagatgacct

SEQ ID NO: 11404 - DNA, 20 bp, synthetic construct
  misc_feature 1..20: note = Description of Artificial Sequence: Synthetic oligonucleotide
  misc_feature 1..20: note = Target: ANGPTL4; (+) strand; PAM type: NRG; PAM sequence: CAG
  source 1..20: mol_type = other DNA
cattagatgacctcagtgtc

SEQ ID NO: 11405 - DNA, 20 bp, synthetic construct
  misc_feature 1..20: note = Description of Artificial Sequence: Synthetic oligonucleotide
  misc_feature 1..20: note = Target: ANGPTL4; (+) strand; PAM type: NRG; PAM sequence: AGG
  source 1..20: mol_type = other DNA
attagatgacctcagtgtcc

SEQ ID NO: 11406 - DNA, 20 bp, synthetic construct
  misc_feature 1..20: note = Description of Artificial Sequence: Synthetic oligonucleotide
  misc_feature 1..20: note = Target: ANGPTL4; (+) strand; PAM type: NRG; PAM sequence: GAG
  source 1..20: mol_type = other DNA
tagatgacctcagtgtccag

SEQ ID NO: 11407 - DNA, 20 bp, synthetic construct
  misc_feature 1..20: note = Description of Artificial Sequence: Synthetic oligonucleotide
  misc_feature 1..20: note = Target: ANGPTL4; (+) strand; PAM type: NRG; PAM sequence: TGG
  source 1..20: mol_type = other DNA
atgacctcagtgtccaggag

SEQ ID NO: 11408 - DNA, 20 bp, synthetic construct
  misc_feature 1..20: note = Description of Artificial Sequence: Synthetic oligonucleotide
  misc_feature 1..20: note = Target: ANGPTL4; (+) strand; PAM type: NRG; PAM sequence: GGG
  source 1..20: mol_type = other DNA
tgacctcagtgtccaggagt

SEQ ID NO: 11409 - DNA, 20 bp, synthetic construct
  misc_feature 1..20: note = Description of Artificial Sequence: Synthetic oligonucleotide
  misc_feature 1..20: note = Target: ANGPTL4; (+) strand; PAM type: NRG; PAM sequence: AAG
  source 1..20: mol_type = other DNA
cctcagtgtccaggagtggg

SEQ ID NO: 11410 - DNA, 20 bp, synthetic construct
  misc_feature 1..20: note = Description of Artificial Sequence: Synthetic oligonucleotide
  misc_feature 1..20: note = Target: ANGPTL4; (+) strand; PAM type: NRG; PAM sequence: TGG
  source 1..20: mol_type = other DNA
gtccttgctcaattcccatt

SEQ ID NO: 11411 - DNA, 20 bp, synthetic construct
  misc_feature 1..20: note = Description of Artificial Sequence: Synthetic oligonucleotide
  misc_feature 1..20: note = Target: ANGPTL4; (+) strand; PAM type: NRG; PAM sequence: GGG
  source 1..20: mol_type = other DNA
tccttgctcaattcccattt

SEQ ID NO: 11412 - DNA, 20 bp, synthetic construct
  misc_feature 1..20: note = Description of Artificial Sequence: Synthetic oligonucleotide
  misc_feature 1..20: note = Target: ANGPTL4; (+) strand; PAM type: NRG; PAM sequence: GGG
  source 1..20: mol_type = other DNA
ccttgctcaattcccatttg

SEQ ID NO: 11413 - DNA, 20 bp, synthetic construct
  misc_feature 1..20: note = Description of Artificial Sequence: Synthetic oligonucleotide
  misc_feature 1..20: note = Target: ANGPTL4; (+) strand; PAM type: NRG; PAM sequence: TGG
  source 1..20: mol_type = other DNA
aattcccatttggggtgttc

SEQ ID NO: 11414 - DNA, 20 bp, synthetic construct
  misc_feature 1..20: note = Description of Artificial Sequence: Synthetic oligonucleotide
  misc_feature 1..20: note = Target: ANGPTL4; (+) strand; PAM type: NRG; PAM sequence: TGG
  source 1..20: mol_type = other DNA
ccatttggggtgttctggcc

SEQ ID NO: 11415 - DNA, 20 bp, synthetic construct
  misc_feature 1..20: note = Description of Artificial Sequence: Synthetic oligonucleotide
  misc_feature 1..20: note = Target: ANGPTL4; (+) strand; PAM type: NRG; PAM sequence: TGG
  source 1..20: mol_type = other DNA
tggggtgttctggcctggtc

SEQ ID NO: 11416 - DNA, 20 bp, synthetic construct
  misc_feature 1..20: note = Description of Artificial Sequence: Synthetic oligonucleotide
  misc_feature 1..20: note = Target: ANGPTL4; (+) strand; PAM type: NRG; PAM sequence: GGG
  source 1..20: mol_type = other DNA
ggggtgttctggcctggtct

SEQ ID NO: 11417 - DNA, 20 bp, synthetic construct
  misc_feature 1..20: note = Description of Artificial Sequence: Synthetic oligonucleotide
  misc_feature 1..20: note = Target: ANGPTL4; (+) strand; PAM type: NRG; PAM sequence: GGG
  source 1..20: mol_type = other DNA
gggtgttctggcctggtctg

SEQ ID NO: 11418 - DNA, 20 bp, synthetic construct
  misc_feature 1..20: note = Description of Artificial Sequence: Synthetic oligonucleotide
  misc_feature 1..20: note = Target: ANGPTL4; (+) strand; PAM type: NRG; PAM sequence: GGG
  source 1..20: mol_type = other DNA
ggtgttctggcctggtctgg

SEQ ID NO: 11419 - DNA, 20 bp, synthetic construct
  misc_feature 1..20: note = Description of Artificial Sequence: Synthetic oligonucleotide
  misc_feature 1..20: note = Target: ANGPTL4; (+) strand; PAM type: NRG; PAM sequence: GAG
  source 1..20: mol_type = other DNA
ttctggcctggtctgggggt

SEQ ID NO: 11420 - DNA, 20 bp, synthetic construct
  misc_feature 1..20: note = Description of Artificial Sequence: Synthetic oligonucleotide
  misc_feature 1..20: note = Target: ANGPTL4; (+) strand; PAM type: NRG; PAM sequence: AGG
  source 1..20: mol_type = other DNA
tctggcctggtctgggggtg

SEQ ID NO: 11421 - DNA, 20 bp, synthetic construct
  misc_feature 1..20: note = Description of Artificial Sequence: Synthetic oligonucleotide
  misc_feature 1..20: note = Target: ANGPTL4; (+) strand; PAM type: NRG; PAM sequence: AAG
  source 1..20: mol_type = other DNA
gcctggtctgggggtgaggc

SEQ ID NO: 11422 - DNA, 20 bp, synthetic construct
  misc_feature 1..20: note = Description of Artificial Sequence: Synthetic oligonucleotide
  misc_feature 1..20: note = Target: ANGPTL4; (+) strand; PAM type: NRG; PAM sequence: AGG
  source 1..20: mol_type = other DNA
cctggtctgggggtgaggca

SEQ ID NO: 11423 - DNA, 20 bp, synthetic construct
  misc_feature 1..20: note = Description of Artificial Sequence: Synthetic oligonucleotide
  misc_feature 1..20: note = Target: ANGPTL4; (+) strand; PAM type: NRG; PAM sequence: CAG
  source 1..20: mol_type = other DNA
ggtctgggggtgaggcaagg

SEQ ID NO: 11424 - DNA, 20 bp, synthetic construct
  misc_feature 1..20: note = Description of Artificial Sequence: Synthetic oligonucleotide
  misc_feature 1..20: note = Target: ANGPTL4; (+) strand; PAM type: NRG; PAM sequence: AGG
  source 1..20: mol_type = other DNA
gtctgggggtgaggcaaggc

SEQ ID NO: 11425 - DNA, 20 bp, synthetic construct
  misc_feature 1..20: note = Description of Artificial Sequence: Synthetic oligonucleotide
  misc_feature 1..20: note = Target: ANGPTL4; (+) strand; PAM type: NRG; PAM sequence: GGG
  source 1..20: mol_type = other DNA
tctgggggtgaggcaaggca

SEQ ID NO: 11426 - DNA, 20 bp, synthetic construct
  misc_feature 1..20: note = Description of Artificial Sequence: Synthetic oligonucleotide
  misc_feature 1..20: note = Target: ANGPTL4; (+) strand; PAM type: NRG; PAM sequence: CAG
  source 1..20: mol_type = other DNA
ggcaaggcagggtgtccttc

SEQ ID NO: 11427 - DNA, 20 bp, synthetic construct
  misc_feature 1..20: note = Description of Artificial Sequence: Synthetic oligonucleotide
  misc_feature 1..20: note = Target: ANGPTL4; (+) strand; PAM type: NRG; PAM sequence: AAG
  source 1..20: mol_type = other DNA
aaggcagggtgtccttccag

SEQ ID NO: 11428 - DNA, 20 bp, synthetic construct
  misc_feature 1..20: note = Description of Artificial Sequence: Synthetic oligonucleotide
  misc_feature 1..20: note = Target: ANGPTL4; (+) strand; PAM type: NRG; PAM sequence: TGG
  source 1..20: mol_type = other DNA
cagggtgtccttccagaagc

SEQ ID NO: 11429 - DNA, 20 bp, synthetic construct
  misc_feature 1..20: note = Description of Artificial Sequence: Synthetic oligonucleotide
  misc_feature 1..20: note = Target: ANGPTL4; (+) strand; PAM type: NRG; PAM sequence: GGG
  source 1..20: mol_type = other DNA
agggtgtccttccagaagct

SEQ ID NO: 11430 - DNA, 20 bp, synthetic construct
  misc_feature 1..20: note = Description of Artificial Sequence: Synthetic oligonucleotide
  misc_feature 1..20: note = Target: ANGPTL4; (+) strand; PAM type: NRG; PAM sequence: CAG
  source 1..20: mol_type = other DNA
tccttccagaagctgggacc

SEQ ID NO: 11431 - DNA, 20 bp, synthetic construct
  misc_feature 1..20: note = Description of Artificial Sequence: Synthetic oligonucleotide
  misc_feature 1..20: note = Target: ANGPTL4; (+) strand; PAM type: NRG; PAM sequence: GAG
  source 1..20: mol_type = other DNA
cttccagaagctgggaccca

SEQ ID NO: 11432 - DNA, 20 bp, synthetic construct
  misc_feature 1..20: note = Description of Artificial Sequence: Synthetic oligonucleotide
  misc_feature 1..20: note = Target: ANGPTL4; (+) strand; PAM type: NRG; PAM sequence: GAG
  source 1..20: mol_type = other DNA
tccagaagctgggacccaga

SEQ ID NO: 11433 - DNA, 20 bp, synthetic construct
  misc_feature 1..20: note = Description of Artificial Sequence: Synthetic oligonucleotide
  misc_feature 1..20: note = Target: ANGPTL4; (+) strand; PAM type: NRG; PAM sequence: GAG
  source 1..20: mol_type = other DNA
cagaagctgggacccagaga

SEQ ID NO: 11434 - DNA, 20 bp, synthetic construct
  misc_feature 1..20: note = Description of Artificial Sequence: Synthetic oligonucleotide
  misc_feature 1..20: note = Target: ANGPTL4; (+) strand; PAM type: NRG; PAM sequence: AAG
  source 1..20: mol_type = other DNA
aagctgggacccagagagag

SEQ ID NO: 11435 - DNA, 20 bp, synthetic construct
  misc_feature 1..20: note = Description of Artificial Sequence: Synthetic oligonucleotide
  misc_feature 1..20: note = Target: ANGPTL4; (+) strand; PAM type: NRG; PAM sequence: GAG
  source 1..20: mol_type = other DNA
tgggacccagagagagaagt

SEQ ID NO: 11436 - DNA, 20 bp, synthetic construct
  misc_feature 1..20: note = Description of Artificial Sequence: Synthetic oligonucleotide
  misc_feature 1..20: note = Target: ANGPTL4; (+) strand; PAM type: NRG; PAM sequence: AGG
  source 1..20: mol_type = other DNA
gggacccagagagagaagtg

SEQ ID NO: 11437 - DNA, 20 bp, synthetic construct
  misc_feature 1..20: note = Description of Artificial Sequence: Synthetic oligonucleotide
  misc_feature 1..20: note = Target: ANGPTL4; (+) strand; PAM type: NRG; PAM sequence: AAG
  source 1..20: mol_type = other DNA
cccagagagagaagtgagga

SEQ ID NO: 11438 - DNA, 20 bp, synthetic construct
  misc_feature 1..20: note = Description of Artificial Sequence: Synthetic oligonucleotide
  misc_feature 1..20: note = Target: ANGPTL4; (+) strand; PAM type: NRG; PAM sequence: GAG
  source 1..20: mol_type = other DNA
cagagagagaagtgaggaaa

SEQ ID NO: 11439 - DNA, 20 bp, synthetic construct
  misc_feature 1..20: note = Description of Artificial Sequence: Synthetic oligonucleotide
  misc_feature 1..20: note = Target: ANGPTL4; (+) strand; PAM type: NRG; PAM sequence: GAG
  source 1..20: mol_type = other DNA
gagagagaagtgaggaaaga

SEQ ID NO: 11440 - DNA, 20 bp, synthetic construct
  misc_feature 1..20: note = Description of Artificial Sequence: Synthetic oligonucleotide
  misc_feature 1..20: note = Target: ANGPTL4; (+) strand; PAM type: NRG; PAM sequence: CGG
  source 1..20: mol_type = other DNA
gtgaggaaagagagtcccgc

SEQ ID NO: 11441 - DNA, 20 bp, synthetic construct
  misc_feature 1..20: note = Description of Artificial Sequence: Synthetic oligonucleotide
  misc_feature 1..20: note = Target: ANGPTL4; (+) strand; PAM type: NRG; PAM sequence: GGG
  source 1..20: mol_type = other DNA
tgaggaaagagagtcccgcc

SEQ ID NO: 11442 - DNA, 20 bp, synthetic construct
  misc_feature 1..20: note = Description of Artificial Sequence: Synthetic oligonucleotide
  misc_feature 1..20: note = Target: ANGPTL4; (+) strand; PAM type: NRG; PAM sequence: CAG
  source 1..20: mol_type = other DNA
aaagagagtcccgccgggcg

SEQ ID NO: 11443 - DNA, 20 bp, synthetic construct
  misc_feature 1..20: note = Description of Artificial Sequence: Synthetic oligonucleotide
  misc_feature 1..20: note = Target: ANGPTL4; (+) strand; PAM type: NRG; PAM sequence: TGG
  source 1..20: mol_type = other DNA
gagagtcccgccgggcgcag

SEQ ID NO: 11444 - DNA, 20 bp, synthetic construct
  misc_feature 1..20: note = Description of Artificial Sequence: Synthetic oligonucleotide
  misc_feature 1..20: note = Target: ANGPTL4; (+) strand; PAM type: NRG; PAM sequence: CAG
  source 1..20: mol_type = other DNA
gtggttcacacctgtaatcc

SEQ ID NO: 11445 - DNA, 20 bp, synthetic construct
  misc_feature 1..20: note = Description of Artificial Sequence: Synthetic oligonucleotide
  misc_feature 1..20: note = Target: ANGPTL4; (+) strand; PAM type: NRG; PAM sequence: TGG
  source 1..20: mol_type = other DNA
cacctgtaatcccagcactt

SEQ ID NO: 11446 - DNA, 20 bp, synthetic construct
  misc_feature 1..20: note = Description of Artificial Sequence: Synthetic oligonucleotide
  misc_feature 1..20: note = Target: ANGPTL4; (+) strand; PAM type: NRG; PAM sequence: GGG
  source 1..20: mol_type = other DNA
acctgtaatcccagcacttt

SEQ ID NO: 11447 - DNA, 20 bp, synthetic construct
  misc_feature 1..20: note = Description of Artificial Sequence: Synthetic oligonucleotide
  misc_feature 1..20: note = Target: ANGPTL4; (+) strand; PAM type: NRG; PAM sequence: GAG
  source 1..20: mol_type = other DNA
ctgtaatcccagcactttgg

SEQ ID NO: 11448 - DNA, 20 bp, synthetic construct
  misc_feature 1..20: note = Description of Artificial Sequence: Synthetic oligonucleotide
  misc_feature 1..20: note = Target: ANGPTL4; (+) strand; PAM type: NRG; PAM sequence: AGG
  source 1..20: mol_type = other DNA
tgtaatcccagcactttggg

SEQ ID NO: 11449 - DNA, 20 bp, synthetic construct
  misc_feature 1..20: note = Description of Artificial Sequence: Synthetic oligonucleotide
  misc_feature 1..20: note = Target: ANGPTL4; (+) strand; PAM type: NRG; PAM sequence: AAG
  source 1..20: mol_type = other DNA
tcccagcactttgggaggcc

SEQ ID NO: 11450 - DNA, 20 bp, synthetic construct
  misc_feature 1..20: note = Description of Artificial Sequence: Synthetic oligonucleotide
  misc_feature 1..20: note = Target: ANGPTL4; (+) strand; PAM type: NRG; PAM sequence: AGG
  source 1..20: mol_type = other DNA
cccagcactttgggaggcca

SEQ ID NO: 11451 - DNA, 20 bp, synthetic construct
  misc_feature 1..20: note = Description of Artificial Sequence: Synthetic oligonucleotide
  misc_feature 1..20: note = Target: ANGPTL4; (+) strand; PAM type: NRG; PAM sequence: TGG
  source 1..20: mol_type = other DNA
gcactttgggaggccaaggc

SEQ ID NO: 11452 - DNA, 20 bp, synthetic construct
  misc_feature 1..20: note = Description of Artificial Sequence: Synthetic oligonucleotide
  misc_feature 1..20: note = Target: ANGPTL4; (+) strand; PAM type: NRG; PAM sequence: CGG
  source 1..20: mol_type = other DNA
ctttgggaggccaaggctgg

SEQ ID NO: 11453 - DNA, 20 bp, synthetic construct
  misc_feature 1..20: note = Description of Artificial Sequence: Synthetic oligonucleotide
  misc_feature 1..20: note = Target: ANGPTL4; (+) strand; PAM type: NRG; PAM sequence: GAG
  source 1..20: mol_type = other DNA
ggccaaggctggcggatcac

SEQ ID NO: 11454 - DNA, 20 bp, synthetic construct
  misc_feature 1..20: note = Description of Artificial Sequence: Synthetic oligonucleotide
  misc_feature 1..20: note = Target: ANGPTL4; (+) strand; PAM type: NRG; PAM sequence: AGG
  source 1..20: mol_type = other DNA
gccaaggctggcggatcacg

SEQ ID NO: 11455 - DNA, 20 bp, synthetic construct
  misc_feature 1..20: note = Description of Artificial Sequence: Synthetic oligonucleotide
  misc_feature 1..20: note = Target: ANGPTL4; (+) strand; PAM type: NRG; PAM sequence: CAG
  source 1..20: mol_type = other DNA
aggctggcggatcacgaggt

SEQ ID NO: 11456 - DNA, 20 bp, synthetic construct
  misc_feature 1..20: note = Description of Artificial Sequence: Synthetic oligonucleotide
  misc_feature 1..20: note = Target: ANGPTL4; (+) strand; PAM type: NRG; PAM sequence: AGG
  source 1..20: mol_type = other DNA
ggctggcggatcacgaggtc

SEQ ID NO: 11457 - DNA, 20 bp, synthetic construct
  misc_feature 1..20: note = Description of Artificial Sequence: Synthetic oligonucleotide
  misc_feature 1..20: note = Target: ANGPTL4; (+) strand; PAM type: NRG; PAM sequence: GAG
  source 1..20: mol_type = other DNA
ctggcggatcacgaggtcag

SEQ ID NO: 11458 - DNA, 20 bp, synthetic construct
  misc_feature 1..20: note = Description of Artificial Sequence: Synthetic oligonucleotide
  misc_feature 1..20: note = Target: ANGPTL4; (+) strand; PAM type: NRG; PAM sequence: GAG
  source 1..20: mol_type = other DNA
gatcacgaggtcaggagatc

SEQ ID NO: 11459 - DNA, 20 bp, synthetic construct
  misc_feature 1..20: note = Description of Artificial Sequence: Synthetic oligonucleotide
  misc_feature 1..20: note = Target: ANGPTL4; (+) strand; PAM type: NRG; PAM sequence: CAG
  source 1..20: mol_type = other DNA
cgaggtcaggagatcgagac

SEQ ID NO: 11460 - DNA, 20 bp, synthetic construct
  misc_feature 1..20: note = Description of Artificial Sequence: Synthetic oligonucleotide
  misc_feature 1..20: note = Target: ANGPTL4; (+) strand; PAM type: NRG; PAM sequence: TGG
  source 1..20: mol_type = other DNA
tcaggagatcgagaccagtc

SEQ ID NO: 11461 - DNA, 20 bp, synthetic construct
  misc_feature 1..20: note = Description of Artificial Sequence: Synthetic oligonucleotide
  misc_feature 1..20: note = Target: ANGPTL4; (+) strand; PAM type: NRG; PAM sequence: TGG
  source 1..20: mol_type = other DNA
cgagaccagtctggccaaca

SEQ ID NO: 11462 - DNA, 20 bp, synthetic construct
  misc_feature 1..20: note = Description of Artificial Sequence: Synthetic oligonucleotide
  misc_feature 1..20: note = Target: ANGPTL4; (+) strand; PAM type: NRG; PAM sequence: TAG
  source 1..20: mol_type = other DNA
tctacaaataatgcaaaaac

SEQ ID NO: 11463 - DNA, 20 bp, synthetic construct
  misc_feature 1..20: note = Description of Artificial Sequence: Synthetic oligonucleotide
  misc_feature 1..20: note = Target: ANGPTL4; (+) strand; PAM type: NRG; PAM sequence: CGG
  source 1..20: mol_type = other DNA
caaataatgcaaaaactagt

SEQ ID NO: 11464 - DNA, 20 bp, synthetic construct
  misc_feature 1..20: note = Description of Artificial Sequence: Synthetic oligonucleotide
  misc_feature 1..20: note = Target: ANGPTL4; (+) strand; PAM type: NRG; PAM sequence: GGG
  source 1..20: mol_type = other DNA
aaataatgcaaaaactagtc

SEQ ID NO: 11465 - DNA, 20 bp, synthetic construct
  misc_feature 1..20: note = Description of Artificial Sequence: Synthetic oligonucleotide
  misc_feature 1..20: note = Target: ANGPTL4; (+) strand; PAM type: NRG; PAM sequence: TGG
  source 1..20: mol_type = other DNA
atgcaaaaactagtcgggcg

SEQ ID NO: 11466 - DNA, 20 bp, synthetic construct
  misc_feature 1..20: note = Description of Artificial Sequence: Synthetic oligonucleotide
  misc_feature 1..20: note = Target: ANGPTL4; (+) strand; PAM type: NRG; PAM sequence: TGG
  source 1..20: mol_type = other DNA
caaaaactagtcgggcgtgg

SEQ ID NO: 11467 - DNA, 20 bp, synthetic construct
  misc_feature 1..20: note = Description of Artificial Sequence: Synthetic oligonucleotide
  misc_feature 1..20: note = Target: ANGPTL4; (+) strand; PAM type: NRG; PAM sequence: TAG
  source 1..20: mol_type = other DNA
ggcgtggtggcacatgcctg

SEQ ID NO: 11468 - DNA, 20 bp, synthetic construct
  misc_feature 1..20: note = Description of Artificial Sequence: Synthetic oligonucleotide
  misc_feature 1..20: note = Target: ANGPTL4; (+) strand; PAM type: NRG; PAM sequence: CAG
  source 1..20: mol_type = other DNA
gtggcacatgcctgtagtcc

SEQ ID NO: 11469 - DNA, 20 bp, synthetic construct
  misc_feature 1..20: note = Description of Artificial Sequence: Synthetic oligonucleotide
  misc_feature 1..20: note = Target: ANGPTL4; (+) strand; PAM type: NRG; PAM sequence: CGG
  source 1..20: mol_type = other DNA
gcctgtagtcccagctgctc

SEQ ID NO: 11470 - DNA, 20 bp, synthetic construct
  misc_feature 1..20: note = Description of Artificial Sequence: Synthetic oligonucleotide
  misc_feature 1..20: note = Target: ANGPTL4; (+) strand; PAM type: NRG; PAM sequence: GAG
  source 1..20: mol_type = other DNA
ctgtagtcccagctgctccg

SEQ ID NO: 11471 - DNA, 20 bp, synthetic construct
  misc_feature 1..20: note = Description of Artificial Sequence: Synthetic oligonucleotide
  misc_feature 1..20: note = Target: ANGPTL4; (+) strand; PAM type: NRG; PAM sequence: AGG
  source 1..20: mol_type = other DNA
tgtagtcccagctgctccgg

SEQ ID NO: 11472 - DNA, 20 bp, synthetic construct
  misc_feature 1..20: note = Description of Artificial Sequence: Synthetic oligonucleotide
  misc_feature 1..20: note = Target: ANGPTL4; (+) strand; PAM type: NRG; PAM sequence: CGG
  source 1..20: mol_type = other DNA
cccagctgctccggaggctg

SEQ ID NO: 11473 - DNA, 20 bp, synthetic construct
  misc_feature 1..20: note = Description of Artificial Sequence: Synthetic oligonucleotide
  misc_feature 1..20: note = Target: ANGPTL4; (+) strand; PAM type: NRG; PAM sequence: CAG
  source 1..20: mol_type = other DNA
agctgctccggaggctgcgg

SEQ ID NO: 11474 - DNA, 20 bp, synthetic construct
  misc_feature 1..20: note = Description of Artificial Sequence: Synthetic oligonucleotide
  misc_feature 1..20: note = Target: ANGPTL4; (+) strand; PAM type: NRG; PAM sequence: TGG
  source 1..20: mol_type = other DNA
gcggcagaattgcttgaacc

SEQ ID NO: 11475 - DNA, 20 bp, synthetic construct
  misc_feature 1..20: note = Description of Artificial Sequence: Synthetic oligonucleotide
  misc_feature 1..20: note = Target: ANGPTL4; (+) strand; PAM type: NRG; PAM sequence: GGG
  source 1..20: mol_type = other DNA
cggcagaattgcttgaacct

SEQ ID NO: 11476 - DNA, 20 bp, synthetic construct
  misc_feature 1..20: note = Description of Artificial Sequence: Synthetic oligonucleotide
  misc_feature 1..20: note = Target: ANGPTL4; (+) strand; PAM type: NRG; PAM sequence: GAG
  source 1..20: mol_type = other DNA
gcagaattgcttgaacctgg

SEQ ID NO: 11477 - DNA, 20 bp, synthetic construct
  misc_feature 1..20: note = Description of Artificial Sequence: Synthetic oligonucleotide
  misc_feature 1..20: note = Target: ANGPTL4; (+) strand; PAM type: NRG; PAM sequence: AGG
  source 1..20: mol_type = other DNA
cagaattgcttgaacctggg

SEQ ID NO: 11478 - DNA, 20 bp, synthetic construct
  misc_feature 1..20: note = Description of Artificial Sequence: Synthetic oligonucleotide
  misc_feature 1..20: note = Target: ANGPTL4; (+) strand; PAM type: NRG; PAM sequence: CGG
  source 1..20: mol_type = other DNA
aattgcttgaacctgggagg

SEQ ID NO: 11479 - DNA, 20 bp, synthetic construct
  misc_feature 1..20: note = Description of Artificial Sequence: Synthetic oligonucleotide
  misc_feature 1..20: note = Target: ANGPTL4; (+) strand; PAM type: NRG; PAM sequence: GAG
  source 1..20: mol_type = other DNA
ttgcttgaacctgggaggcg

SEQ ID NO: 11480 - DNA, 20 bp, synthetic construct
  misc_feature 1..20: note = Description of Artificial Sequence: Synthetic oligonucleotide
  misc_feature 1..20: note = Target: ANGPTL4; (+) strand; PAM type: NRG; PAM sequence: AGG
  source 1..20: mol_type = other DNA
tgcttgaacctgggaggcgg

SEQ ID NO: 11481 - DNA, 20 bp, synthetic construct
  misc_feature 1..20: note = Description of Artificial Sequence: Synthetic oligonucleotide
  misc_feature 1..20: note = Target: ANGPTL4; (+) strand; PAM type: NRG; PAM sequence: CAG
  source 1..20: mol_type = other DNA
aacctgggaggcggaggttg

SEQ ID NO: 11482 - DNA, 20 bp, synthetic construct
  misc_feature 1..20: note = Description of Artificial Sequence: Synthetic oligonucleotide
  misc_feature 1..20: note = Target: ANGPTL4; (+) strand; PAM type: NRG; PAM sequence: GAG
  source 1..20: mol_type = other DNA
tgggaggcggaggttgcagt

SEQ ID NO: 11483 - DNA, 20 bp, synthetic construct
  misc_feature 1..20: note = Description of Artificial Sequence: Synthetic oligonucleotide
  misc_feature 1..20: note = Target: ANGPTL4; (+) strand; PAM type: NRG; PAM sequence: AAG
  source 1..20: mol_type = other DNA
ggcggaggttgcagtgagcc

SEQ ID NO: 11484 - DNA, 20 bp, synthetic construct
  misc_feature 1..20: note = Description of Artificial Sequence: Synthetic oligonucleotide
  misc_feature 1..20: note = Target: ANGPTL4; (+) strand; PAM type: NRG; PAM sequence: CAG
  source 1..20: mol_type = other DNA
aagattgcgccactgcactc

SEQ ID NO: 11485 - DNA, 20 bp, synthetic construct
  misc_feature 1..20: note = Description of Artificial Sequence: Synthetic oligonucleotide
  misc_feature 1..20: note = Target: ANGPTL4; (+) strand; PAM type: NRG; PAM sequence: TGG
  source 1..20: mol_type = other DNA
tgcgccactgcactccagcc

SEQ ID NO: 11486 - DNA, 20 bp, synthetic construct
  misc_feature 1..20: note = Description of Artificial Sequence: Synthetic oligonucleotide
  misc_feature 1..20: note = Target: ANGPTL4; (+) strand; PAM type: NRG; PAM sequence: CAG
  source 1..20: mol_type = other DNA
actgcactccagcctggcga

SEQ ID NO: 11487 - DNA, 20 bp, synthetic construct
  misc_feature 1..20: note = Description of Artificial Sequence: Synthetic oligonucleotide
  misc_feature 1..20: note = Target: ANGPTL4; (+) strand; PAM type: NRG; PAM sequence: GAG
  source 1..20: mol_type = other DNA
tgcactccagcctggcgaca

SEQ ID NO: 11488 - DNA, 20 bp, synthetic construct
  misc_feature 1..20: note = Description of Artificial Sequence: Synthetic oligonucleotide
  misc_feature 1..20: note = Target: ANGPTL4; (+) strand; PAM type: NRG; PAM sequence: GAG
  source 1..20: mol_type = other DNA
ctccagcctggcgacagagc

SEQ ID NO: 11489 - DNA, 20 bp, synthetic construct
  misc_feature 1..20: note = Description of Artificial Sequence: Synthetic oligonucleotide
  misc_feature 1..20: note = Target: ANGPTL4; (+) strand; PAM type: NRG; PAM sequence: AAG
  source 1..20: mol_type = other DNA
atcaaaaaacaaaacaaaaa

SEQ ID NO: 11490 - DNA, 20 bp, synthetic construct
  misc_feature 1..20: note = Description of Artificial Sequence: Synthetic oligonucleotide
  misc_feature 1..20: note = Target: ANGPTL4; (+) strand; PAM type: NRG; PAM sequence: GAG
  source 1..20: mol_type = other DNA
caaaaaacaaaacaaaaaaa

SEQ ID NO: 11491 - DNA, 20 bp, synthetic construct
  misc_feature 1..20: note = Description of Artificial Sequence: Synthetic oligonucleotide
  misc_feature 1..20: note = Target: ANGPTL4; (+) strand; PAM type: NRG; PAM sequence: GAG
  source 1..20: mol_type = other DNA
aaaaacaaaacaaaaaaaga

SEQ ID NO: 11492 - DNA, 20 bp, synthetic construct
  misc_feature 1..20: note = Description of Artificial Sequence: Synthetic oligonucleotide
  misc_feature 1..20: note = Target: ANGPTL4; (+) strand; PAM type: NRG; PAM sequence: CAG
  source 1..20: mol_type = other DNA
aaaacaaaaaaagagagtcc

SEQ ID NO: 11493 - DNA, 20 bp, synthetic construct
  misc_feature 1..20: note = Description of Artificial Sequence: Synthetic oligonucleotide
  misc_feature 1..20: note = Target: ANGPTL4; (+) strand; PAM type: NRG; PAM sequence: AGG
  source 1..20: mol_type = other DNA
aaacaaaaaaagagagtccc

SEQ ID NO: 11494 - DNA, 20 bp, synthetic construct
  misc_feature 1..20: note = Description of Artificial Sequence: Synthetic oligonucleotide
  misc_feature 1..20: note = Target: ANGPTL4; (+) strand; PAM type: NRG; PAM sequence: CAG
  source 1..20: mol_type = other DNA
caaaaaaagagagtcccagg

SEQ ID NO: 11495 - DNA, 20 bp, synthetic construct
  misc_feature 1..20: note = Description of Artificial Sequence: Synthetic oligonucleotide
  misc_feature 1..20: note = Target: ANGPTL4; (+) strand; PAM type: NRG; PAM sequence: AGG
  source 1..20: mol_type = other DNA
aaaaaaagagagtcccaggc

SEQ ID NO: 11496 - DNA, 20 bp, synthetic construct
  misc_feature 1..20: note = Description of Artificial Sequence: Synthetic oligonucleotide
  misc_feature 1..20: note = Target: ANGPTL4; (+) strand; PAM type: NRG; PAM sequence: GGG
  source 1..20: mol_type = other DNA
aaaaaagagagtcccaggca

SEQ ID NO: 11497 - DNA, 20 bp, synthetic construct
  misc_feature 1..20: note = Description of Artificial Sequence: Synthetic oligonucleotide
  misc_feature 1..20: note = Target: ANGPTL4; (+) strand; PAM type: NRG; PAM sequence: GGG
  source 1..20: mol_type = other DNA
aaaaagagagtcccaggcag

SEQ ID NO: 11498 - DNA, 20 bp, synthetic construct
  misc_feature 1..20: note = Description of Artificial Sequence: Synthetic oligonucleotide
  misc_feature 1..20: note = Target: ANGPTL4; (+) strand; PAM type: NRG; PAM sequence: GGG
  source 1..20: mol_type = other DNA
aaaagagagtcccaggcagg

SEQ ID NO: 11499 - DNA, 20 bp, synthetic construct
  misc_feature 1..20: note = Description of Artificial Sequence: Synthetic oligonucleotide
  misc_feature 1..20: note = Target: ANGPTL4; (+) strand; PAM type: NRG; PAM sequence: CAG
  source 1..20: mol_type = other DNA
agagtcccaggcagggggaa

SEQ ID NO: 11500 - DNA, 20 bp, synthetic construct
  misc_feature 1..20: note = Description of Artificial Sequence: Synthetic oligonucleotide
  misc_feature 1..20: note = Target: ANGPTL4; (+) strand; PAM type: NRG; PAM sequence: AAG
  source 1..20: mol_type = other DNA
cagggggaacagcatgtgca

SEQ ID NO: 11501 - DNA, 20 bp, synthetic construct
  misc_feature 1..20: note = Description of Artificial Sequence: Synthetic oligonucleotide
  misc_feature 1..20: note = Target: ANGPTL4; (+) strand; PAM type: NRG; PAM sequence: TGG
  source 1..20: mol_type = other DNA
cagcatgtgcaaagtccctg

SEQ ID NO: 11502 - DNA, 20 bp, synthetic construct
  misc_feature 1..20: note = Description of Artificial Sequence: Synthetic oligonucleotide
  misc_feature 1..20: note = Target: ANGPTL4; (+) strand; PAM type: NRG; PAM sequence: CAG
  source 1..20: mol_type = other DNA
catgtgcaaagtccctgtgg

SEQ ID NO: 11503 - DNA, 20 bp, synthetic construct
  misc_feature 1..20: note = Description of Artificial Sequence: Synthetic oligonucleotide
  misc_feature 1..20: note = Target: ANGPTL4; (+) strand; PAM type: NRG; PAM sequence: AGG
  source 1..20: mol_type = other DNA
atgtgcaaagtccctgtggc

SEQ ID NO: 11504 - DNA, 20 bp, synthetic construct
  misc_feature 1..20: note = Description of Artificial Sequence: Synthetic oligonucleotide
  misc_feature 1..20: note = Target: ANGPTL4; (+) strand; PAM type: NRG; PAM sequence: CGG
  source 1..20: mol_type = other DNA
gcaaagtccctgtggcagga

SEQ ID NO: 11505 - DNA, 20 bp, synthetic construct
  misc_feature 1..20: note = Description of Artificial Sequence: Synthetic oligonucleotide
  misc_feature 1..20: note = Target: ANGPTL4; (+) strand; PAM type: NRG; PAM sequence: TGG
  source 1..20: mol_type = other DNA
ccctgtggcaggacggtgtg

SEQ ID NO: 11506 - DNA, 20 bp, synthetic construct
  misc_feature 1..20: note = Description of Artificial Sequence: Synthetic oligonucleotide
  misc_feature 1..20: note = Target: ANGPTL4; (+) strand; PAM type: NRG; PAM sequence: AAG
  source 1..20: mol_type = other DNA
ggcaggacggtgtgtggtac

SEQ ID NO: 11507 - DNA, 20 bp, synthetic construct
  misc_feature 1..20: note = Description of Artificial Sequence: Synthetic oligonucleotide
  misc_feature 1..20: note = Target: ANGPTL4; (+) strand; PAM type: NRG; PAM sequence: AGG
  source 1..20: mol_type = other DNA
gcaggacggtgtgtggtaca

SEQ ID NO: 11508 - DNA, 20 bp, synthetic construct
  misc_feature 1..20: note = Description of Artificial Sequence: Synthetic oligonucleotide
  misc_feature 1..20: note = Target: ANGPTL4; (+) strand; PAM type: NRG; PAM sequence: GGG
  source 1..20: mol_type = other DNA
caggacggtgtgtggtacaa

SEQ ID NO: 11509 - DNA, 20 bp, synthetic construct
  misc_feature 1..20: note = Description of Artificial Sequence: Synthetic oligonucleotide
  misc_feature 1..20: note = Target: ANGPTL4; (+) strand; PAM type: NRG; PAM sequence: TGG
  source 1..20: mol_type = other DNA
gacggtgtgtggtacaaggg

SEQ ID NO: 11510 - DNA, 20 bp, synthetic construct
  misc_feature 1..20: note = Description of Artificial Sequence: Synthetic oligonucleotide
  misc_feature 1..20: note = Target: ANGPTL4; (+) strand; PAM type: NRG; PAM sequence: GGG
  source 1..20: mol_type = other DNA
acggtgtgtggtacaagggt

SEQ ID NO: 11511 - DNA, 20 bp, synthetic construct
  misc_feature 1..20: note = Description of Artificial Sequence: Synthetic oligonucleotide
  misc_feature 1..20: note = Target: ANGPTL4; (+) strand; PAM type: NRG; PAM sequence: AAG
  source 1..20: mol_type = other DNA
gtgtgtggtacaagggtggg

SEQ ID NO: 11512 - DNA, 20 bp, synthetic construct
  misc_feature 1..20: note = Description of Artificial Sequence: Synthetic oligonucleotide
  misc_feature 1..20: note = Target: ANGPTL4; (+) strand; PAM type: NRG; PAM sequence: AAG
  source 1..20: mol_type = other DNA
gtggtacaagggtgggaaga

SEQ ID NO: 11513 - DNA, 20 bp, synthetic construct
  misc_feature 1..20: note = Description of Artificial Sequence: Synthetic oligonucleotide
  misc_feature 1..20: note = Target: ANGPTL4; (+) strand; PAM type: NRG; PAM sequence: CAG
  source 1..20: mol_type = other DNA
tgggaagaaagcctgtgtgc

SEQ ID NO: 11514 - DNA, 20 bp, synthetic construct
  misc_feature 1..20: note = Description of Artificial Sequence: Synthetic oligonucleotide
  misc_feature 1..20: note = Target: ANGPTL4; (+) strand; PAM type: NRG; PAM sequence: GAG
  source 1..20: mol_type = other DNA
ggaagaaagcctgtgtgcca

SEQ ID NO: 11515 - DNA, 20 bp, synthetic construct
  misc_feature 1..20: note = Description of Artificial Sequence: Synthetic oligonucleotide
  misc_feature 1..20: note = Target: ANGPTL4; (+) strand; PAM type: NRG; PAM sequence: GAG
  source 1..20: mol_type = other DNA
aagaaagcctgtgtgccaga

SEQ ID NO: 11516 - DNA, 20 bp, synthetic construct
  misc_feature 1..20: note = Description of Artificial Sequence: Synthetic oligonucleotide
  misc_feature 1..20: note = Target: ANGPTL4; (+) strand; PAM type: NRG; PAM sequence: AGG
  source 1..20: mol_type = other DNA
agaaagcctgtgtgccagag

SEQ ID NO: 11517 - DNA, 20 bp, synthetic construct
  misc_feature 1..20: note = Description of Artificial Sequence: Synthetic oligonucleotide
  misc_feature 1..20: note = Target: ANGPTL4; (+) strand; PAM type: NRG; PAM sequence: GGG
  source 1..20: mol_type = other DNA
gaaagcctgtgtgccagaga

SEQ ID NO: 11518 - DNA, 20 bp, synthetic construct
  misc_feature 1..20: note = Description of Artificial Sequence: Synthetic oligonucleotide
  misc_feature 1..20: note = Target: ANGPTL4; (+) strand; PAM type: NRG; PAM sequence: TGG
  source 1..20: mol_type = other DNA
cctgtgtgccagagagggtg

SEQ ID NO: 11519 - DNA, 20 bp, synthetic construct
  misc_feature 1..20: note = Description of Artificial Sequence: Synthetic oligonucleotide
  misc_feature 1..20: note = Target: ANGPTL4; (+) strand; PAM type: NRG; PAM sequence: GGG
  source 1..20: mol_type = other DNA
ctgtgtgccagagagggtgt

SEQ ID NO: 11520 - DNA, 20 bp, synthetic construct
  misc_feature 1..20: note = Description of Artificial Sequence: Synthetic oligonucleotide
  misc_feature 1..20: note = Target: ANGPTL4; (+) strand; PAM type: NRG; PAM sequence: CAG
  source 1..20: mol_type = other DNA
tgccagagagggtgtgggta

SEQ ID NO: 11521 - DNA, 20 bp, synthetic construct
  misc_feature 1..20: note = Description of Artificial Sequence: Synthetic oligonucleotide
  misc_feature 1..20: note = Target: ANGPTL4; (+) strand; PAM type: NRG; PAM sequence: TGG
  source 1..20: mol_type = other DNA
gagagggtgtgggtacagca

SEQ ID NO: 11522 - DNA, 20 bp, synthetic construct
  misc_feature 1..20: note = Description of Artificial Sequence: Synthetic oligonucleotide
  misc_feature 1..20: note = Target: ANGPTL4; (+) strand; PAM type: NRG; PAM sequence: CAG
  source 1..20: mol_type = other DNA
agggtgtgggtacagcatgg

SEQ ID NO: 11523 - DNA, 20 bp, synthetic construct
  misc_feature 1..20: note = Description of Artificial Sequence: Synthetic oligonucleotide
  misc_feature 1..20: note = Target: ANGPTL4; (+) strand; PAM type: NRG; PAM sequence: AGG
  source 1..20: mol_type = other DNA
gggtgtgggtacagcatggc

SEQ ID NO: 11524 - DNA, 20 bp, synthetic construct
  misc_feature 1..20: note = Description of Artificial Sequence: Synthetic oligonucleotide
  misc_feature 1..20: note = Target: ANGPTL4; (+) strand; PAM type: NRG; PAM sequence: GAG
  source 1..20: mol_type = other DNA
gtgtgggtacagcatggcag

SEQ ID NO: 11525 - DNA, 20 bp, synthetic construct
  misc_feature 1..20: note = Description of Artificial Sequence: Synthetic oligonucleotide
  misc_feature 1..20: note = Target: ANGPTL4; (+) strand; PAM type: NRG; PAM sequence: AGG
  source 1..20: mol_type = other DNA
tgtgggtacagcatggcagg

SEQ ID NO: 11526 - DNA, 20 bp, synthetic construct
  misc_feature 1..20: note = Description of Artificial Sequence: Synthetic oligonucleotide
  misc_feature 1..20: note = Target: ANGPTL4; (+) strand; PAM type: NRG; PAM sequence: GAG
  source 1..20: mol_type = other DNA
tgggtacagcatggcaggag

SEQ ID NO: 11527 - DNA, 20 bp, synthetic construct
  misc_feature 1..20: note = Description of Artificial Sequence: Synthetic oligonucleotide
  misc_feature 1..20: note = Target: ANGPTL4; (+) strand; PAM type: NRG; PAM sequence: AGG
  source 1..20: mol_type = other DNA
gggtacagcatggcaggagg

SEQ ID NO: 11528 - DNA, 20 bp, synthetic construct
  misc_feature 1..20: note = Description of Artificial Sequence: Synthetic oligonucleotide
  misc_feature 1..20: note = Target: ANGPTL4; (+) strand; PAM type: NRG; PAM sequence: TGG
  source 1..20: mol_type = other DNA
acagcatggcaggaggagga

SEQ ID NO: 11529 - DNA, 20 bp, synthetic construct
  misc_feature 1..20: note = Description of Artificial Sequence: Synthetic oligonucleotide
  misc_feature 1..20: note = Target: ANGPTL4; (+) strand; PAM type: NRG; PAM sequence: GGG
  source 1..20: mol_type = other DNA
cagcatggcaggaggaggat

SEQ ID NO: 11530 - DNA, 20 bp, synthetic construct
  misc_feature 1..20: note = Description of Artificial Sequence: Synthetic oligonucleotide
  misc_feature 1..20: note = Target: ANGPTL4; (+) strand; PAM type: NRG; PAM sequence: CGG
  source 1..20: mol_type = other DNA
tggcaggaggaggatgggca

SEQ ID NO: 11531 - DNA, 20 bp, synthetic construct
  misc_feature 1..20: note = Description of Artificial Sequence: Synthetic oligonucleotide
  misc_feature 1..20: note = Target: ANGPTL4; (+) strand; PAM type: NRG; PAM sequence: GGG
  source 1..20: mol_type = other DNA
ggcaggaggaggatgggcac

SEQ ID NO: 11532 - DNA, 20 bp, synthetic construct
  misc_feature 1..20: note = Description of Artificial Sequence: Synthetic oligonucleotide
  misc_feature 1..20: note = Target: ANGPTL4; (+) strand; PAM type: NRG; PAM sequence: GGG
  source 1..20: mol_type = other DNA
gcaggaggaggatgggcacg

SEQ ID NO: 11533 - DNA, 20 bp, synthetic construct
  misc_feature 1..20: note = Description of Artificial Sequence: Synthetic oligonucleotide
  misc_feature 1..20: note = Target: ANGPTL4; (+) strand; PAM type: NRG; PAM sequence: GGG
  source 1..20: mol_type = other DNA
caggaggaggatgggcacgg

SEQ ID NO: 11534 - DNA, 20 bp, synthetic construct
  misc_feature 1..20: note = Description of Artificial Sequence: Synthetic oligonucleotide
  misc_feature 1..20: note = Target: ANGPTL4; (+) strand; PAM type: NRG; PAM sequence: TGG
  source 1..20: mol_type = other DNA
aggaggatgggcacgggggc

SEQ ID NO: 11535 - DNA, 20 bp, synthetic construct
  misc_feature 1..20: note = Description of Artificial Sequence: Synthetic oligonucleotide
  misc_feature 1..20: note = Target: ANGPTL4; (+) strand; PAM type: NRG; PAM sequence: CAG
  source 1..20: mol_type = other DNA
gggcacgggggctggtcctc

SEQ ID NO: 11536 - DNA, 20 bp, synthetic construct
  misc_feature 1..20: note = Description of Artificial Sequence: Synthetic oligonucleotide
  misc_feature 1..20: note = Target: ANGPTL4; (+) strand; PAM type: NRG; PAM sequence: AGG
  source 1..20: mol_type = other DNA
ggcacgggggctggtcctcc

SEQ ID NO: 11537 - DNA, 20 bp, synthetic construct
  misc_feature 1..20: note = Description of Artificial Sequence: Synthetic oligonucleotide
  misc_feature 1..20: note = Target: ANGPTL4; (+) strand; PAM type: NRG; PAM sequence: TGG
  source 1..20: mol_type = other DNA
ctggtcctccaggtgccttg

SEQ ID NO: 11538 - DNA, 20 bp, synthetic construct
  misc_feature 1..20: note = Description of Artificial Sequence: Synthetic oligonucleotide
  misc_feature 1..20: note = Target: ANGPTL4; (+) strand; PAM type: NRG; PAM sequence: GAG
  source 1..20: mol_type = other DNA
ggtgccttgtggaccatgct

SEQ ID NO: 11539 - DNA, 20 bp, synthetic construct
  misc_feature 1..20: note = Description of Artificial Sequence: Synthetic oligonucleotide
  misc_feature 1..20: note = Target: ANGPTL4; (+) strand; PAM type: NRG; PAM sequence: AGG
  source 1..20: mol_type = other DNA
gtgccttgtggaccatgctg

SEQ ID NO: 11540 - DNA, 20 bp, synthetic construct
  misc_feature 1..20: note = Description of Artificial Sequence: Synthetic oligonucleotide
  misc_feature 1..20: note = Target: ANGPTL4; (+) strand; PAM type: NRG; PAM sequence: AAG
  source 1..20: mol_type = other DNA
ccttgtggaccatgctgagg

SEQ ID NO: 11541 - DNA, 20 bp, synthetic construct
  misc_feature 1..20: note = Description of Artificial Sequence: Synthetic oligonucleotide
  misc_feature 1..20: note = Target: ANGPTL4; (+) strand; PAM type: NRG; PAM sequence: AGG
  source 1..20: mol_type = other DNA
cttgtggaccatgctgagga

SEQ ID NO: 11542 - DNA, 20 bp, synthetic construct
  misc_feature 1..20: note = Description of Artificial Sequence: Synthetic oligonucleotide
  misc_feature 1..20: note = Target: ANGPTL4; (+) strand; PAM type: NRG; PAM sequence: TAG
  source 1..20: mol_type = other DNA
gaccatgctgaggaaggaca

SEQ ID NO: 11543 - DNA, 20 bp, synthetic construct
  misc_feature 1..20: note = Description of Artificial Sequence: Synthetic oligonucleotide
  misc_feature 1..20: note = Target: ANGPTL4; (+) strand; PAM type: NRG; PAM sequence: AGG
  source 1..20: mol_type = other DNA
accatgctgaggaaggacat

SEQ ID NO: 11544 - DNA, 20 bp, synthetic construct
  misc_feature 1..20: note = Description of Artificial Sequence: Synthetic oligonucleotide
  misc_feature 1..20: note = Target: ANGPTL4; (+) strand; PAM type: NRG; PAM sequence: GGG
  source 1..20: mol_type = other DNA
ccatgctgaggaaggacata

SEQ ID NO: 11545 - DNA, 20 bp, synthetic construct
  misc_feature 1..20: note = Description of Artificial Sequence: Synthetic oligonucleotide
  misc_feature 1..20: note = Target: ANGPTL4; (+) strand; PAM type: NRG; PAM sequence: GAG
  source 1..20: mol_type = other DNA
atgctgaggaaggacatagg

SEQ ID NO: 11546 - DNA, 20 bp, synthetic construct
  misc_feature 1..20: note = Description of Artificial Sequence: Synthetic oligonucleotide
  misc_feature 1..20: note = Target: ANGPTL4; (+) strand; PAM type: NRG; PAM sequence: TGG
  source 1..20: mol_type = other DNA
aggaaggacatagggagcca

SEQ ID NO: 11547 - DNA, 20 bp, synthetic construct
  misc_feature 1..20: note = Description of Artificial Sequence: Synthetic oligonucleotide
  misc_feature 1..20: note = Target: ANGPTL4; (+) strand; PAM type: NRG; PAM sequence: AAG
  source 1..20: mol_type = other DNA
aaggacatagggagccatgg

SEQ ID NO: 11548 - DNA, 20 bp, synthetic construct
  misc_feature 1..20: note = Description of Artificial Sequence: Synthetic oligonucleotide
  misc_feature 1..20: note = Target: ANGPTL4; (+) strand; PAM type: NRG; PAM sequence: GAG
  source 1..20: mol_type = other DNA
ggacatagggagccatggaa

SEQ ID NO: 11549 - DNA, 20 bp, synthetic construct
  misc_feature 1..20: note = Description of Artificial Sequence: Synthetic oligonucleotide
  misc_feature 1..20: note = Target: ANGPTL4; (+) strand; PAM type: NRG; PAM sequence: AGG
  source 1..20: mol_type = other DNA
gacatagggagccatggaag

SEQ ID NO: 11550 - DNA, 20 bp, synthetic construct
  misc_feature 1..20: note = Description of Artificial Sequence: Synthetic oligonucleotide
  misc_feature 1..20: note = Target: ANGPTL4; (+) strand; PAM type: NRG; PAM sequence: TAG
  source 1..20: mol_type = other DNA
tagggagccatggaagaggt

SEQ ID NO: 11551 - DNA, 20 bp, synthetic construct
  misc_feature 1..20: note = Description of Artificial Sequence: Synthetic oligonucleotide
  misc_feature 1..20: note = Target: ANGPTL4; (+) strand; PAM type: NRG; PAM sequence: AGG
  source 1..20: mol_type = other DNA
agggagccatggaagaggtt

SEQ ID NO: 11552 - DNA, 20 bp, synthetic construct
  misc_feature 1..20: note = Description of Artificial Sequence: Synthetic oligonucleotide
  misc_feature 1..20: note = Target: ANGPTL4; (+) strand; PAM type: NRG; PAM sequence: CAG
  source 1..20: mol_type = other DNA
gagccatggaagaggttagg

SEQ ID NO: 11553 - DNA, 20 bp, synthetic construct
  misc_feature 1..20: note = Description of Artificial Sequence: Synthetic oligonucleotide
  misc_feature 1..20: note = Target: ANGPTL4; (+) strand; PAM type: NRG; PAM sequence: TGG
  source 1..20: mol_type = other DNA
catggaagaggttaggcaga

SEQ ID NO: 11554 - DNA, 20 bp, synthetic construct
  misc_feature 1..20: note = Description of Artificial Sequence: Synthetic oligonucleotide
  misc_feature 1..20: note = Target: ANGPTL4; (+) strand; PAM type: NRG; PAM sequence: CAG
  source 1..20: mol_type = other DNA
ggaagaggttaggcagatgg

SEQ ID NO: 11555 - DNA, 20 bp, synthetic construct
  misc_feature 1..20: note = Description of Artificial Sequence: Synthetic oligonucleotide
  misc_feature 1..20: note = Target: ANGPTL4; (+) strand; PAM type: NRG; PAM sequence: GAG
  source 1..20: mol_type = other DNA
aagaggttaggcagatggca

SEQ ID NO: 11556 - DNA, 20 bp, synthetic construct
  misc_feature 1..20: note = Description of Artificial Sequence: Synthetic oligonucleotide
  misc_feature 1..20: note = Target: ANGPTL4; (+) strand; PAM type: NRG; PAM sequence: GAG
  source 1..20: mol_type = other DNA
gaggttaggcagatggcaga

SEQ ID NO: 11557 - DNA, 20 bp, synthetic construct
  misc_feature 1..20: note = Description of Artificial Sequence: Synthetic oligonucleotide
  misc_feature 1..20: note = Target: ANGPTL4; (+) strand; PAM type: NRG; PAM sequence: AGG
  source 1..20: mol_type = other DNA
aggttaggcagatggcagag

SEQ ID NO: 11558 - DNA, 20 bp, synthetic construct
  misc_feature 1..20: note = Description of Artificial Sequence: Synthetic oligonucleotide
  misc_feature 1..20: note = Target: ANGPTL4; (+) strand; PAM type: NRG; PAM sequence: TGG
  source 1..20: mol_type = other DNA
ttaggcagatggcagagagg

SEQ ID NO: 11559 - DNA, 20 bp, synthetic construct
  misc_feature 1..20: note = Description of Artificial Sequence: Synthetic oligonucleotide
  misc_feature 1..20: note = Target: ANGPTL4; (+) strand; PAM type: NRG; PAM sequence: GAG
  source 1..20: mol_type = other DNA
gatggcagagaggtggtcat

SEQ ID NO: 11560 - DNA, 20 bp, synthetic construct
  misc_feature 1..20: note = Description of Artificial Sequence: Synthetic oligonucleotide
  misc_feature 1..20: note = Target: ANGPTL4; (+) strand; PAM type: NRG; PAM sequence: AAG
  source 1..20: mol_type = other DNA
cagagaggtggtcatgagat

SEQ ID NO: 11561 - DNA, 20 bp, synthetic construct
  misc_feature 1..20: note = Description of Artificial Sequence: Synthetic oligonucleotide
  misc_feature 1..20: note = Target: ANGPTL4; (+) strand; PAM type: NRG; PAM sequence: TGG
  source 1..20: mol_type = other DNA
agatttgccttttacttccc

SEQ ID NO: 11562 - DNA, 20 bp, synthetic construct
  misc_feature 1..20: note = Description of Artificial Sequence: Synthetic oligonucleotide
  misc_feature 1..20: note = Target: ANGPTL4; (+) strand; PAM type: NRG; PAM sequence: AAG
  source 1..20: mol_type = other DNA
ttccctggtcatccactgtt

SEQ ID NO: 11563 - DNA, 20 bp, synthetic construct
  misc_feature 1..20: note = Description of Artificial Sequence: Synthetic oligonucleotide
  misc_feature 1..20: note = Target: ANGPTL4; (+) strand; PAM type: NRG; PAM sequence: CAG
  source 1..20: mol_type = other DNA
gtcatccactgttaagcccc

SEQ ID NO: 11564 - DNA, 20 bp, synthetic construct
  misc_feature 1..20: note = Description of Artificial Sequence: Synthetic oligonucleotide
  misc_feature 1..20: note = Target: ANGPTL4; (+) strand; PAM type: NRG; PAM sequence: TGG
  source 1..20: mol_type = other DNA
gttaagcccccagatatgcc

SEQ ID NO: 11565 - DNA, 20 bp, synthetic construct
  misc_feature 1..20: note = Description of Artificial Sequence: Synthetic oligonucleotide
  misc_feature 1..20: note = Target: ANGPTL4; (+) strand; PAM type: NRG; PAM sequence: GAG
  source 1..20: mol_type = other DNA
cccagatatgcctggctcct

SEQ ID NO: 11566 - DNA, 20 bp, synthetic construct
  misc_feature 1..20: note = Description of Artificial Sequence: Synthetic oligonucleotide
  misc_feature 1..20: note = Target: ANGPTL4; (+) strand; PAM type: NRG; PAM sequence: CAG
  source 1..20: mol_type = other DNA
ctggctcctgagaccccccc

SEQ ID NO: 11567 - DNA, 20 bp, synthetic construct
  misc_feature 1..20: note = Description of Artificial Sequence: Synthetic oligonucleotide
  misc_feature 1..20: note = Target: ANGPTL4; (+) strand; PAM type: NRG; PAM sequence: AGG
  source 1..20: mol_type = other DNA
tggctcctgagacccccccc

SEQ ID NO: 11568 - DNA, 20 bp, synthetic construct
  misc_feature 1..20: note = Description of Artificial Sequence: Synthetic oligonucleotide
  misc_feature 1..20: note = Target: ANGPTL4; (+) strand; PAM type: NRG; PAM sequence: GGG
  source 1..20: mol_type = other DNA
ggctcctgagacccccccca

SEQ ID NO: 11569 - DNA, 20 bp, synthetic construct
  misc_feature 1..20: note = Description of Artificial Sequence: Synthetic oligonucleotide
  misc_feature 1..20: note = Target: ANGPTL4; (+) strand; PAM type: NRG; PAM sequence: GGG
  source 1..20: mol_type = other DNA
gctcctgagaccccccccag

SEQ ID NO: 11570 - DNA, 20 bp, synthetic construct
  misc_feature 1..20: note = Description of Artificial Sequence: Synthetic oligonucleotide
  misc_feature 1..20: note = Target: ANGPTL4; (+) strand; PAM type: NRG; PAM sequence: AAG
  source 1..20: mol_type = other DNA
aggggctgccctcctgtttc

SEQ ID NO: 11571 - DNA, 20 bp, synthetic construct
  misc_feature 1..20: note = Description of Artificial Sequence: Synthetic oligonucleotide
  misc_feature 1..20: note = Target: ANGPTL4; (+) strand; PAM type: NRG; PAM sequence: CAG
  source 1..20: mol_type = other DNA
gtctccactttatctccctt

SEQ ID NO: 11572 - DNA, 20 bp, synthetic construct
  misc_feature 1..20: note = Description of Artificial Sequence: Synthetic oligonucleotide
  misc_feature 1..20: note = Target: ANGPTL4; (+) strand; PAM type: NRG; PAM sequence: AGG
  source 1..20: mol_type = other DNA
tctccactttatctcccttc

SEQ ID NO: 11573 - DNA, 20 bp, synthetic construct
  misc_feature 1..20: note = Description of Artificial Sequence: Synthetic oligonucleotide
  misc_feature 1..20: note = Target: ANGPTL4; (+) strand; PAM type: NRG; PAM sequence: GGG
  source 1..20: mol_type = other DNA
ctccactttatctcccttca

SEQ ID NO: 11574 - DNA, 20 bp, synthetic construct
  misc_feature 1..20: note = Description of Artificial Sequence: Synthetic oligonucleotide
  misc_feature 1..20: note = Target: ANGPTL4; (+) strand; PAM type: NRG; PAM sequence: CAG
  source 1..20: mol_type = other DNA
tatctcccttcagggctgcc

SEQ ID NO: 11575 - DNA, 20 bp, synthetic construct
  misc_feature 1..20: note = Description of Artificial Sequence: Synthetic oligonucleotide
  misc_feature 1..20: note = Target: ANGPTL4; (+) strand; PAM type: NRG; PAM sequence: AGG
  source 1..20: mol_type = other DNA
atctcccttcagggctgccc

SEQ ID NO: 11576 - DNA, 20 bp, synthetic construct
  misc_feature 1..20: note = Description of Artificial Sequence: Synthetic oligonucleotide
  misc_feature 1..20: note = Target: ANGPTL4; (+) strand; PAM type: NRG; PAM sequence: GGG
  source 1..20: mol_type = other DNA
tctcccttcagggctgccca

SEQ ID NO: 11577 - DNA, 20 bp, synthetic construct
  misc_feature 1..20: note = Description of Artificial Sequence: Synthetic oligonucleotide
  misc_feature 1..20: note = Target: ANGPTL4; (+) strand; PAM type: NRG; PAM sequence: CAG
  source 1..20: mol_type = other DNA
cagggctgcccagggattgc

SEQ ID NO: 11578 - DNA, 20 bp, synthetic construct
  misc_feature 1..20: note = Description of Artificial Sequence: Synthetic oligonucleotide
  misc_feature 1..20: note = Target: ANGPTL4; (+) strand; PAM type: NRG; PAM sequence: AGG
  source 1..20: mol_type = other DNA
agggctgcccagggattgcc

SEQ ID NO: 11579 - DNA, 20 bp, synthetic construct
  misc_feature 1..20: note = Description of Artificial Sequence: Synthetic oligonucleotide
  misc_feature 1..20: note = Target: ANGPTL4; (+) strand; PAM type: NRG; PAM sequence: GAG
  source 1..20: mol_type = other DNA
ggctgcccagggattgccag

SEQ ID NO: 11580 - DNA, 20 bp, synthetic construct
  misc_feature 1..20: note = Description of Artificial Sequence: Synthetic oligonucleotide
  misc_feature 1..20: note = Target: ANGPTL4; (+) strand; PAM type: NRG; PAM sequence: CAG
  source 1..20: mol_type = other DNA
gggattgccaggagctgttc

SEQ ID NO: 11581 - DNA, 20 bp, synthetic construct
  misc_feature 1..20: note = Description of Artificial Sequence: Synthetic oligonucleotide
  misc_feature 1..20: note = Target: ANGPTL4; (+) strand; PAM type: NRG; PAM sequence: AGG
  source 1..20: mol_type = other DNA
ggattgccaggagctgttcc

SEQ ID NO: 11582 - DNA, 20 bp, synthetic construct
  misc_feature 1..20: note = Description of Artificial Sequence: Synthetic oligonucleotide
  misc_feature 1..20: note = Target: ANGPTL4; (+) strand; PAM type: NRG; PAM sequence: TGG
  source 1..20: mol_type = other DNA
tgccaggagctgttccaggt

SEQ ID NO: 11583 - DNA, 20 bp, synthetic construct
  misc_feature 1..20: note = Description of Artificial Sequence: Synthetic oligonucleotide
  misc_feature 1..20: note = Target: ANGPTL4; (+) strand; PAM type: NRG; PAM sequence: GGG
  source 1..20: mol_type = other DNA
gccaggagctgttccaggtt

SEQ ID NO: 11584 - DNA, 20 bp, synthetic construct
  misc_feature 1..20: note = Description of Artificial Sequence: Synthetic oligonucleotide
  misc_feature 1..20: note = Target: ANGPTL4; (+) strand; PAM type: NRG; PAM sequence: GGG
  source 1..20: mol_type = other DNA
ccaggagctgttccaggttg

SEQ ID NO: 11585 - DNA, 20 bp, synthetic construct
  misc_feature 1..20: note = Description of Artificial Sequence: Synthetic oligonucleotide
  misc_feature 1..20: note = Target: ANGPTL4; (+) strand; PAM type: NRG; PAM sequence: GAG
  source 1..20: mol_type = other DNA
aggagctgttccaggttggg

SEQ ID NO: 11586 - DNA, 20 bp, synthetic construct
  misc_feature 1..20: note = Description of Artificial Sequence: Synthetic oligonucleotide
  misc_feature 1..20: note = Target: ANGPTL4; (+) strand; PAM type: NRG; PAM sequence: GAG
  source 1..20: mol_type = other DNA
gagctgttccaggttgggga

SEQ ID NO: 11587 - DNA, 20 bp, synthetic construct
  misc_feature 1..20: note = Description of Artificial Sequence: Synthetic oligonucleotide
  misc_feature 1..20: note = Target: ANGPTL4; (+) strand; PAM type: NRG; PAM sequence: AGG
  source 1..20: mol_type = other DNA
agctgttccaggttggggag

SEQ ID NO: 11588 - DNA, 20 bp, synthetic construct
  misc_feature 1..20: note = Description of Artificial Sequence: Synthetic oligonucleotide
  misc_feature 1..20: note = Target: ANGPTL4; (+) strand; PAM type: NRG; PAM sequence: CAG
  source 1..20: mol_type = other DNA
tgttccaggttggggagagg

SEQ ID NO: 11589 - DNA, 20 bp, synthetic construct
  misc_feature 1..20: note = Description of Artificial Sequence: Synthetic oligonucleotide
  misc_feature 1..20: note = Target: ANGPTL4; (+) strand; PAM type: NRG; PAM sequence: GAG
  source 1..20: mol_type = other DNA
ttccaggttggggagaggca

SEQ ID NO: 11590 - DNA, 20 bp, synthetic construct
  misc_feature 1..20: note = Description of Artificial Sequence: Synthetic oligonucleotide
  misc_feature 1..20: note = Target: ANGPTL4; (+) strand; PAM type: NRG; PAM sequence: TGG
  source 1..20: mol_type = other DNA
caggttggggagaggcagag

SEQ ID NO: 11591 - DNA, 20 bp, synthetic construct
  misc_feature 1..20: note = Description of Artificial Sequence: Synthetic oligonucleotide
  misc_feature 1..20: note = Target: ANGPTL4; (+) strand; PAM type: NRG; PAM sequence: CAG
  source 1..20: mol_type = other DNA
agagtggactatttgaaatc

SEQ ID NO: 11592 - DNA, 20 bp, synthetic construct
  misc_feature 1..20: note = Description of Artificial Sequence: Synthetic oligonucleotide
  misc_feature 1..20: note = Target: ANGPTL4; (+) strand; PAM type: NRG; PAM sequence: CAG
  source 1..20: mol_type = other DNA
gactatttgaaatccagcct

SEQ ID NO: 11593 - DNA, 20 bp, synthetic construct
  misc_feature 1..20: note = Description of Artificial Sequence: Synthetic oligonucleotide
  misc_feature 1..20: note = Target: ANGPTL4; (+) strand; PAM type: NRG; PAM sequence: AGG
  source 1..20: mol_type = other DNA
actatttgaaatccagcctc

SEQ ID NO: 11594 - DNA, 20 bp, synthetic construct
  misc_feature 1..20: note = Description of Artificial Sequence: Synthetic oligonucleotide
  misc_feature 1..20: note = Target: ANGPTL4; (+) strand; PAM type: NRG; PAM sequence: GGG
  source 1..20: mol_type = other DNA
ctatttgaaatccagcctca

SEQ ID NO: 11595 - DNA, 20 bp, synthetic construct
  misc_feature 1..20: note = Description of Artificial Sequence: Synthetic oligonucleotide
  misc_feature 1..20: note = Target: ANGPTL4; (+) strand; PAM type: NRG; PAM sequence: GGG
  source 1..20: mol_type = other DNA
tatttgaaatccagcctcag

SEQ ID NO: 11596 - DNA, 20 bp, synthetic construct
  misc_feature 1..20: note = Description of Artificial Sequence: Synthetic oligonucleotide
  misc_feature 1..20: note = Target: ANGPTL4; (+) strand; PAM type: NRG; PAM sequence: TGG
  source 1..20: mol_type = other DNA
tcaggggtctccgccatttt

SEQ ID NO: 11597 - DNA, 20 bp, synthetic construct
  misc_feature 1..20: note = Description of Artificial Sequence: Synthetic oligonucleotide
  misc_feature 1..20: note = Target: ANGPTL4; (+) strand; PAM type: NRG; PAM sequence: AAG
  source 1..20: mol_type = other DNA
cgccatttttggtgaactgc

SEQ ID NO: 11598 - DNA, 20 bp, synthetic construct
  misc_feature 1..20: note = Description of Artificial Sequence: Synthetic oligonucleotide
  misc_feature 1..20: note = Target: ANGPTL4; (+) strand; PAM type: NRG; PAM sequence: CAG
  source 1..20: mol_type = other DNA
ggtgaactgcaagatgacct

SEQ ID NO: 11599 - DNA, 20 bp, synthetic construct
  misc_feature 1..20: note = Description of Artificial Sequence: Synthetic oligonucleotide
  misc_feature 1..20: note = Target: ANGPTL4; (+) strand; PAM type: NRG; PAM sequence: AGG
  source 1..20: mol_type = other DNA
gtgaactgcaagatgacctc

SEQ ID NO: 11600 - DNA, 20 bp, synthetic construct
  misc_feature 1..20: note = Description of Artificial Sequence: Synthetic oligonucleotide
  misc_feature 1..20: note = Target: ANGPTL4; (+) strand; PAM type: NRG; PAM sequence: TAG
  source 1..20: mol_type = other DNA
aactgcaagatgacctcagg

SEQ ID NO: 11601 - DNA, 20 bp, synthetic construct
  misc_feature 1..20: note = Description of Artificial Sequence: Synthetic oligonucleotide
  misc_feature 1..20: note = Target: ANGPTL4; (+) strand; PAM type: NRG; PAM sequence: AGG
  source 1..20: mol_type = other DNA
actgcaagatgacctcaggt

SEQ ID NO: 11602 - DNA, 20 bp, synthetic construct
  misc_feature 1..20: note = Description of Artificial Sequence: Synthetic oligonucleotide
  misc_feature 1..20: note = Target: ANGPTL4; (+) strand; PAM type: NRG; PAM sequence: GGG
  source 1..20: mol_type = other DNA
ctgcaagatgacctcaggta

SEQ ID NO: 11603 - DNA, 20 bp, synthetic construct
  misc_feature 1..20: note = Description of Artificial Sequence: Synthetic oligonucleotide
  misc_feature 1..20: note = Target: ANGPTL4; (+) strand; PAM type: NRG; PAM sequence: TAG
  source 1..20: mol_type = other DNA
tgacctcaggtagggtgtgt

SEQ ID NO: 11604 - DNA, 20 bp, synthetic construct
  misc_feature 1..20: note = Description of Artificial Sequence: Synthetic oligonucleotide
  misc_feature 1..20: note = Target: ANGPTL4; (+) strand; PAM type: NRG; PAM sequence: CAG
  source 1..20: mol_type = other DNA
ggtagggtgtgttagtccac

SEQ ID NO: 11605 - DNA, 20 bp, synthetic construct
  misc_feature 1..20: note = Description of Artificial Sequence: Synthetic oligonucleotide
  misc_feature 1..20: note = Target: ANGPTL4; (+) strand; PAM type: NRG; PAM sequence: AGG
  source 1..20: mol_type = other DNA
gtagggtgtgttagtccacc

SEQ ID NO: 11606 - DNA, 20 bp, synthetic construct
  misc_feature 1..20: note = Description of Artificial Sequence: Synthetic oligonucleotide
  misc_feature 1..20: note = Target: ANGPTL4; (+) strand; PAM type: NRG; PAM sequence: GGG
  source 1..20: mol_type = other DNA
tagggtgtgttagtccacca

SEQ ID NO: 11607 - DNA, 20 bp, synthetic construct
  misc_feature 1..20: note = Description of Artificial Sequence: Synthetic oligonucleotide
  misc_feature 1..20: note = Target: ANGPTL4; (+) strand; PAM type: NRG; PAM sequence: GGG
  source 1..20: mol_type = other DNA
agggtgtgttagtccaccag

SEQ ID NO: 11608 - DNA, 20 bp, synthetic construct
  misc_feature 1..20: note = Description of Artificial Sequence: Synthetic oligonucleotide
  misc_feature 1..20: note = Target: ANGPTL4; (+) strand; PAM type: NRG; PAM sequence: TAG
  source 1..20: mol_type = other DNA
accaggggcccctctcccca

SEQ ID NO: 11609 - DNA, 20 bp, synthetic construct
  misc_feature 1..20: note = Description of Artificial Sequence: Synthetic oligonucleotide
  misc_feature 1..20: note = Target: ANGPTL4; (+) strand; PAM type: NRG; PAM sequence: AGG
  source 1..20: mol_type = other DNA
ccaggggcccctctccccat

SEQ ID NO: 11610 - DNA, 20 bp, synthetic construct
  misc_feature 1..20: note = Description of Artificial Sequence: Synthetic oligonucleotide
  misc_feature 1..20: note = Target: ANGPTL4; (+) strand; PAM type: NRG; PAM sequence: AAG
  source 1..20: mol_type = other DNA
aaaacaaaacaaaaaaatta

SEQ ID NO: 11611 - DNA, 20 bp, synthetic construct
  misc_feature 1..20: note = Description of Artificial Sequence: Synthetic oligonucleotide
  misc_feature 1..20: note = Target: ANGPTL4; (+) strand; PAM type: NRG; PAM sequence: AGG
  source 1..20: mol_type = other DNA
aaacaaaacaaaaaaattaa

SEQ ID NO: 11612 - DNA, 20 bp, synthetic construct
  misc_feature 1..20: note = Description of Artificial Sequence: Synthetic oligonucleotide
  misc_feature 1..20: note = Target: ANGPTL4; (+) strand; PAM type: NRG; PAM sequence: CAG
  source 1..20: mol_type = other DNA
caaaacaaaaaaattaaagg

SEQ ID NO: 11613 - DNA, 20 bp, synthetic construct
  misc_feature 1..20: note = Description of Artificial Sequence: Synthetic oligonucleotide
  misc_feature 1..20: note = Target: ANGPTL4; (+) strand; PAM type: NRG; PAM sequence: AGG
  source 1..20: mol_type = other DNA
aaaacaaaaaaattaaaggc

SEQ ID NO: 11614 - DNA, 20 bp, synthetic construct
  misc_feature 1..20: note = Description of Artificial Sequence: Synthetic oligonucleotide
  misc_feature 1..20: note = Target: ANGPTL4; (+) strand; PAM type: NRG; PAM sequence: GGG
  source 1..20: mol_type = other DNA
aaacaaaaaaattaaaggca

SEQ ID NO: 11615 - DNA, 20 bp, synthetic construct
  misc_feature 1..20: note = Description of Artificial Sequence: Synthetic oligonucleotide
  misc_feature 1..20: note = Target: ANGPTL4; (+) strand; PAM type: NRG; PAM sequence: AAG
  source 1..20: mol_type = other DNA
agggtcttgctatgttgccc

SEQ ID NO: 11616 - DNA, 20 bp, synthetic construct
  misc_feature 1..20: note = Description of Artificial Sequence: Synthetic oligonucleotide
  misc_feature 1..20: note = Target: ANGPTL4; (+) strand; PAM type: NRG; PAM sequence: TGG
  source 1..20: mol_type = other DNA
tcttgctatgttgcccaagc

SEQ ID NO: 11617 - DNA, 20 bp, synthetic construct
  misc_feature 1..20: note = Description of Artificial Sequence: Synthetic oligonucleotide
  misc_feature 1..20: note = Target: ANGPTL4; (+) strand; PAM type: NRG; PAM sequence: GAG
  source 1..20: mol_type = other DNA
tttttttttttttttttttt

SEQ ID NO: 11618 - DNA, 20 bp, synthetic construct
  misc_feature 1..20: note = Description of Artificial Sequence: Synthetic oligonucleotide
  misc_feature 1..20: note = Target: ANGPTL4; (+) strand; PAM type: NRG; PAM sequence: TGG
  source 1..20: mol_type = other DNA
ttttttttttttttttgaga

SEQ ID NO: 11619 - DNA, 20 bp, synthetic construct
  misc_feature 1..20: note = Description of Artificial Sequence: Synthetic oligonucleotide
  misc_feature 1..20: note = Target: ANGPTL4; (+) strand; PAM type: NRG; PAM sequence: GAG
  source 1..20: mol_type = other DNA
ttttttttttttttgagatg

SEQ ID NO: 11620 - DNA, 20 bp, synthetic construct
  misc_feature 1..20: note = Description of Artificial Sequence: Synthetic oligonucleotide
  misc_feature 1..20: note = Target: ANGPTL4; (+) strand; PAM type: NRG; PAM sequence: TGG
  source 1..20: mol_type = other DNA
ttgagatggagttttgctct

SEQ ID NO: 11621 - DNA, 20 bp, synthetic construct
  misc_feature 1..20: note = Description of Artificial Sequence: Synthetic oligonucleotide
  misc_feature 1..20: note = Target: ANGPTL4; (+) strand; PAM type: NRG; PAM sequence: GAG
  source 1..20: mol_type = other DNA
gagatggagttttgctcttg

SEQ ID NO: 11622 - DNA, 20 bp, synthetic construct
  misc_feature 1..20: note = Description of Artificial Sequence: Synthetic oligonucleotide
  misc_feature 1..20: note = Target: ANGPTL4; (+) strand; PAM type: NRG; PAM sequence: TGG
  source 1..20: mol_type = other DNA
tggagttttgctcttggagc

SEQ ID NO: 11623 - DNA, 20 bp, synthetic construct
  misc_feature 1..20: note = Description of Artificial Sequence: Synthetic oligonucleotide
  misc_feature 1..20: note = Target: ANGPTL4; (+) strand; PAM type: NRG; PAM sequence: GAG
  source 1..20: mol_type = other DNA
gagttttgctcttggagctg

SEQ ID NO: 11624 - DNA, 20 bp, synthetic construct
  misc_feature 1..20: note = Description of Artificial Sequence: Synthetic oligonucleotide
  misc_feature 1..20: note = Target: ANGPTL4; (+) strand; PAM type: NRG; PAM sequence: CAG
  source 1..20: mol_type = other DNA
ggagtgcaatgccacgatct

SEQ ID NO: 11625 - DNA, 20 bp, synthetic construct
  misc_feature 1..20: note = Description of Artificial Sequence: Synthetic oligonucleotide
  misc_feature 1..20: note = Target: ANGPTL4; (+) strand; PAM type: NRG; PAM sequence: CGG
  source 1..20: mol_type = other DNA
tcactgaaacctccgcctcc

SEQ ID NO: 11626 - DNA, 20 bp, synthetic construct
  misc_feature 1..20: note = Description of Artificial Sequence: Synthetic oligonucleotide
  misc_feature 1..20: note = Target: ANGPTL4; (+) strand; PAM type: NRG; PAM sequence: GGG
  source 1..20: mol_type = other DNA
cactgaaacctccgcctccc

SEQ ID NO: 11627 - DNA, 20 bp, synthetic construct
  misc_feature 1..20: note = Description of Artificial Sequence: Synthetic oligonucleotide
  misc_feature 1..20: note = Target: ANGPTL4; (+) strand; PAM type: NRG; PAM sequence: AAG
  source 1..20: mol_type = other DNA
aacctccgcctcccgggttc

SEQ ID NO: 11628 - DNA, 20 bp, synthetic construct
  misc_feature 1..20: note = Description of Artificial Sequence: Synthetic oligonucleotide
  misc_feature 1..20: note = Target: ANGPTL4; (+) strand; PAM type: NRG; PAM sequence: CAG
  source 1..20: mol_type = other DNA
cccgggttcaagcaattctc

SEQ ID NO: 11629 - DNA, 20 bp, synthetic construct
  misc_feature 1..20: note = Description of Artificial Sequence: Synthetic oligonucleotide
  misc_feature 1..20: note = Target: ANGPTL4; (+) strand; PAM type: NRG; PAM sequence: CAG
  source 1..20: mol_type = other DNA
ttcaagcaattctccagcgt

SEQ ID NO: 11630 - DNA, 20 bp, synthetic construct
  misc_feature 1..20: note = Description of Artificial Sequence: Synthetic oligonucleotide
  misc_feature 1..20: note = Target: ANGPTL4; (+) strand; PAM type: NRG; PAM sequence: CAG
  source 1..20: mol_type = other DNA
ttctccagcgtcagcctccc

SEQ ID NO: 11631 - DNA, 20 bp, synthetic construct
  misc_feature 1..20: note = Description of Artificial Sequence: Synthetic oligonucleotide
  misc_feature 1..20: note = Target: ANGPTL4; (+) strand; PAM type: NRG; PAM sequence: TAG
  source 1..20: mol_type = other DNA
tccagcgtcagcctccccag

SEQ ID NO: 11632 - DNA, 20 bp, synthetic construct
  misc_feature 1..20: note = Description of Artificial Sequence: Synthetic oligonucleotide
  misc_feature 1..20: note = Target: ANGPTL4; (+) strand; PAM type: NRG; PAM sequence: GAG
  source 1..20: mol_type = other DNA
cgtcagcctccccagtagct

SEQ ID NO: 11633 - DNA, 20 bp, synthetic construct
  misc_feature 1..20: note = Description of Artificial Sequence: Synthetic oligonucleotide
  misc_feature 1..20: note = Target: ANGPTL4; (+) strand; PAM type: NRG; PAM sequence: CAG
  source 1..20: mol_type = other DNA
ctccccagtagctgagacta

SEQ ID NO: 11634 - DNA, 20 bp, synthetic construct
  misc_feature 1..20: note = Description of Artificial Sequence: Synthetic oligonucleotide
  misc_feature 1..20: note = Target: ANGPTL4; (+) strand; PAM type: NRG; PAM sequence: AGG
  source 1..20: mol_type = other DNA
tccccagtagctgagactac

SEQ ID NO: 11635 - DNA, 20 bp, synthetic construct
  misc_feature 1..20: note = Description of Artificial Sequence: Synthetic oligonucleotide
  misc_feature 1..20: note = Target: ANGPTL4; (+) strand; PAM type: NRG; PAM sequence: GAG
  source 1..20: mol_type = other DNA
gtagctgagactacaggtgc

SEQ ID NO: 11636 - DNA, 20 bp, synthetic construct
  misc_feature 1..20: note = Description of Artificial Sequence: Synthetic oligonucleotide
  misc_feature 1..20: note = Target: ANGPTL4; (+) strand; PAM type: NRG; PAM sequence: CAG
  source 1..20: mol_type = other DNA
caggtgcgagcaaccacacc

SEQ ID NO: 11637 - DNA, 20 bp, synthetic construct
  misc_feature 1..20: note = Description of Artificial Sequence: Synthetic oligonucleotide
  misc_feature 1..20: note = Target: ANGPTL4; (+) strand; PAM type: NRG; PAM sequence: TAG
  source 1..20: mol_type = other DNA
ccagctaatttttgtatttt

SEQ ID NO: 11638 - DNA, 20 bp, synthetic construct
  misc_feature 1..20: note = Description of Artificial Sequence: Synthetic oligonucleotide
  misc_feature 1..20: note = Target: ANGPTL4; (+) strand; PAM type: NRG; PAM sequence: TAG
  source 1..20: mol_type = other DNA
gctaatttttgtatttttag

SEQ ID NO: 11639 - DNA, 20 bp, synthetic construct
  misc_feature 1..20: note = Description of Artificial Sequence: Synthetic oligonucleotide
  misc_feature 1..20: note = Target: ANGPTL4; (+) strand; PAM type: NRG; PAM sequence: GAG
  source 1..20: mol_type = other DNA
taatttttgtatttttagta

SEQ ID NO: 11640 - DNA, 20 bp, synthetic construct
  misc_feature 1..20: note = Description of Artificial Sequence: Synthetic oligonucleotide
  misc_feature 1..20: note = Target: ANGPTL4; (+) strand; PAM type: NRG; PAM sequence: TGG
  source 1..20: mol_type = other DNA
tttgtatttttagtagagac

SEQ ID NO: 11641 - DNA, 20 bp, synthetic construct
  misc_feature 1..20: note = Description of Artificial Sequence: Synthetic oligonucleotide
  misc_feature 1..20: note = Target: ANGPTL4; (+) strand; PAM type: NRG; PAM sequence: GGG
  source 1..20: mol_type = other DNA
ttgtatttttagtagagact

SEQ ID NO: 11642 - DNA, 20 bp, synthetic construct
  misc_feature 1..20: note = Description of Artificial Sequence: Synthetic oligonucleotide
  misc_feature 1..20: note = Target: ANGPTL4; (+) strand; PAM type: NRG; PAM sequence: TGG
  source 1..20: mol_type = other DNA
gagactgggtttcaccatgt

SEQ ID NO: 11643 - DNA, 20 bp, synthetic construct
  misc_feature 1..20: note = Description of Artificial Sequence: Synthetic oligonucleotide
  misc_feature 1..20: note = Target: ANGPTL4; (+) strand; PAM type: NRG; PAM sequence: TGG
  source 1..20: mol_type = other DNA
tgggtttcaccatgttggtc

SEQ ID NO: 11644 - DNA, 20 bp, synthetic construct
  misc_feature 1..20: note = Description of Artificial Sequence: Synthetic oligonucleotide
  misc_feature 1..20: note = Target: ANGPTL4; (+) strand; PAM type: NRG; PAM sequence: TGG
  source 1..20: mol_type = other DNA
tttcaccatgttggtctggc

SEQ ID NO: 11645 - DNA, 20 bp, synthetic construct
  misc_feature 1..20: note = Description of Artificial Sequence: Synthetic oligonucleotide
  misc_feature 1..20: note = Target: ANGPTL4; (+) strand; PAM type: NRG; PAM sequence: TGG
  source 1..20: mol_type = other DNA
ctcaaatgatttgccgactt

SEQ ID NO: 11646 - DNA, 20 bp, synthetic construct
  misc_feature 1..20: note = Description of Artificial Sequence: Synthetic oligonucleotide
  misc_feature 1..20: note = Target: ANGPTL4; (+) strand; PAM type: NRG; PAM sequence: TGG
  source 1..20: mol_type = other DNA
actttggcctcccaaaatgc

SEQ ID NO: 11647 - DNA, 20 bp, synthetic construct
  misc_feature 1..20: note = Description of Artificial Sequence: Synthetic oligonucleotide
  misc_feature 1..20: note = Target: ANGPTL4; (+) strand; PAM type: NRG; PAM sequence: GGG
  source 1..20: mol_type = other DNA
ctttggcctcccaaaatgct

SEQ ID NO: 11648 - DNA, 20 bp, synthetic construct
  misc_feature 1..20: note = Description of Artificial Sequence: Synthetic oligonucleotide
  misc_feature 1..20: note = Target: ANGPTL4; (+) strand; PAM type: NRG; PAM sequence: TAG
  source 1..20: mol_type = other DNA
ctcccaaaatgctgggatta

SEQ ID NO: 11649 - DNA, 20 bp, synthetic construct
  misc_feature 1..20: note = Description of Artificial Sequence: Synthetic oligonucleotide
  misc_feature 1..20: note = Target: ANGPTL4; (+) strand; PAM type: NRG; PAM sequence: AGG
  source 1..20: mol_type = other DNA
tcccaaaatgctgggattat

SEQ ID NO: 11650 - DNA, 20 bp, synthetic construct
  misc_feature 1..20: note = Description of Artificial Sequence: Synthetic oligonucleotide
  misc_feature 1..20: note = Target: ANGPTL4; (+) strand; PAM type: NRG; PAM sequence: TAG
  source 1..20: mol_type = other DNA
aatgctgggattataggcat

SEQ ID NO: 11651 - DNA, 20 bp, synthetic construct
  misc_feature 1..20: note = Description of Artificial Sequence: Synthetic oligonucleotide
  misc_feature 1..20: note = Target: ANGPTL4; (+) strand; PAM type: NRG; PAM sequence: TGG
  source 1..20: mol_type = other DNA
taggcattagccactgctcc

SEQ ID NO: 11652 - DNA, 20 bp, synthetic construct
  misc_feature 1..20: note = Description of Artificial Sequence: Synthetic oligonucleotide
  misc_feature 1..20: note = Target: ANGPTL4; (+) strand; PAM type: NRG; PAM sequence: CAG
  source 1..20: mol_type = other DNA
ggcctcttttctttaaaatg

SEQ ID NO: 11653 - DNA, 20 bp, synthetic construct
  misc_feature 1..20: note = Description of Artificial Sequence: Synthetic oligonucleotide
  misc_feature 1..20: note = Target: ANGPTL4; (+) strand; PAM type: NRG; PAM sequence: TGG
  source 1..20: mol_type = other DNA
tttaaaatgcagcccttgtc

SEQ ID NO: 11654 - DNA, 20 bp, synthetic construct
  misc_feature 1..20: note = Description of Artificial Sequence: Synthetic oligonucleotide
  misc_feature 1..20: note = Target: ANGPTL4; (+) strand; PAM type: NRG; PAM sequence: GGG
  source 1..20: mol_type = other DNA
ttaaaatgcagcccttgtct

SEQ ID NO: 11655 - DNA, 20 bp, synthetic construct
  misc_feature 1..20: note = Description of Artificial Sequence: Synthetic oligonucleotide
  misc_feature 1..20: note = Target: ANGPTL4; (+) strand; PAM type: NRG; PAM sequence: TAG
  source 1..20: mol_type = other DNA
atgcagcccttgtctgggtg

SEQ ID NO: 11656 - DNA, 20 bp, synthetic construct
  misc_feature 1..20: note = Description of Artificial Sequence: Synthetic oligonucleotide
  misc_feature 1..20: note = Target: ANGPTL4; (+) strand; PAM type: NRG; PAM sequence: TGG
  source 1..20: mol_type = other DNA
cagcccttgtctgggtgtag

SEQ ID NO: 11657 - DNA, 20 bp, synthetic construct
  misc_feature 1..20: note = Description of Artificial Sequence: Synthetic oligonucleotide
  misc_feature 1..20: note = Target: ANGPTL4; (+) strand; PAM type: NRG; PAM sequence: TGG
  source 1..20: mol_type = other DNA
tatctgtaatcccgacactt

SEQ ID NO: 11658 - DNA, 20 bp, synthetic construct
  misc_feature 1..20: note = Description of Artificial Sequence: Synthetic oligonucleotide
  misc_feature 1..20: note = Target: ANGPTL4; (+) strand; PAM type: NRG; PAM sequence: GGG
  source 1..20: mol_type = other DNA
atctgtaatcccgacacttt

SEQ ID NO: 11659 - DNA, 20 bp, synthetic construct
  misc_feature 1..20: note = Description of Artificial Sequence: Synthetic oligonucleotide
  misc_feature 1..20: note = Target: ANGPTL4; (+) strand; PAM type: NRG; PAM sequence: GAG
  source 1..20: mol_type = other DNA
ctgtaatcccgacactttgg

SEQ ID NO: 11660 - DNA, 20 bp, synthetic construct
  misc_feature 1..20: note = Description of Artificial Sequence: Synthetic oligonucleotide
  misc_feature 1..20: note = Target: ANGPTL4; (+) strand; PAM type: NRG; PAM sequence: AGG
  source 1..20: mol_type = other DNA
tgtaatcccgacactttggg

SEQ ID NO: 11661 - DNA, 20 bp, synthetic construct
  misc_feature 1..20: note = Description of Artificial Sequence: Synthetic oligonucleotide
  misc_feature 1..20: note = Target: ANGPTL4; (+) strand; PAM type: NRG; PAM sequence: GAG
  source 1..20: mol_type = other DNA
cactttgggaggcctatcat

SEQ ID NO: 11662 - DNA, 20 bp, synthetic construct
  misc_feature 1..20: note = Description of Artificial Sequence: Synthetic oligonucleotide
  misc_feature 1..20: note = Target: ANGPTL4; (+) strand; PAM type: NRG; PAM sequence: AGG
  source 1..20: mol_type = other DNA
actttgggaggcctatcatg

SEQ ID NO: 11663 - DNA, 20 bp, synthetic construct
  misc_feature 1..20: note = Description of Artificial Sequence: Synthetic oligonucleotide
  misc_feature 1..20: note = Target: ANGPTL4; (+) strand; PAM type: NRG; PAM sequence: GAG
  source 1..20: mol_type = other DNA
gcctatcatgaggatcactt

SEQ ID NO: 11664 - DNA, 20 bp, synthetic construct
  misc_feature 1..20: note = Description of Artificial Sequence: Synthetic oligonucleotide
  misc_feature 1..20: note = Target: ANGPTL4; (+) strand; PAM type: NRG; PAM sequence: CAG
  source 1..20: mol_type = other DNA
tcatgaggatcacttgagcc

SEQ ID NO: 11665 - DNA, 20 bp, synthetic construct
  misc_feature 1..20: note = Description of Artificial Sequence: Synthetic oligonucleotide
  misc_feature 1..20: note = Target: ANGPTL4; (+) strand; PAM type: NRG; PAM sequence: AAG
  source 1..20: mol_type = other DNA
tgaggatcacttgagcccag

SEQ ID NO: 11666 - DNA, 20 bp, synthetic construct
  misc_feature 1..20: note = Description of Artificial Sequence: Synthetic oligonucleotide
  misc_feature 1..20: note = Target: ANGPTL4; (+) strand; PAM type: NRG; PAM sequence: GAG
  source 1..20: mol_type = other DNA
tcacttgagcccagaagttc

SEQ ID NO: 11667 - DNA, 20 bp, synthetic construct
  misc_feature 1..20: note = Description of Artificial Sequence: Synthetic oligonucleotide
  misc_feature 1..20: note = Target: ANGPTL4; (+) strand; PAM type: NRG; PAM sequence: CAG
  source 1..20: mol_type = other DNA
tgagcccagaagttcgagac

SEQ ID NO: 11668 - DNA, 20 bp, synthetic construct
  misc_feature 1..20: note = Description of Artificial Sequence: Synthetic oligonucleotide
  misc_feature 1..20: note = Target: ANGPTL4; (+) strand; PAM type: NRG; PAM sequence: TGG
  source 1..20: mol_type = other DNA
ccagaagttcgagaccagcc

SEQ ID NO: 11669 - DNA, 20 bp, synthetic construct
  misc_feature 1..20: note = Description of Artificial Sequence: Synthetic oligonucleotide
  misc_feature 1..20: note = Target: ANGPTL4; (+) strand; PAM type: NRG; PAM sequence: TAG
  source 1..20: mol_type = other DNA
cgagaccagcctggacaaca

SEQ ID NO: 11670 - DNA, 20 bp, synthetic construct
  misc_feature 1..20: note = Description of Artificial Sequence: Synthetic oligonucleotide
  misc_feature 1..20: note = Target: ANGPTL4; (+) strand; PAM type: NRG; PAM sequence: GAG
  source 1..20: mol_type = other DNA
accagcctggacaacatagt

SEQ ID NO: 11671 - DNA, 20 bp, synthetic construct
  misc_feature 1..20: note = Description of Artificial Sequence: Synthetic oligonucleotide
  misc_feature 1..20: note = Target: ANGPTL4; (+) strand; PAM type: NRG; PAM sequence: GAG
  source 1..20: mol_type = other DNA
cagcctggacaacatagtga

SEQ ID NO: 11672 - DNA, 20 bp, synthetic construct
  misc_feature 1..20: note = Description of Artificial Sequence: Synthetic oligonucleotide
  misc_feature 1..20: note = Target: ANGPTL4; (+) strand; PAM type: NRG; PAM sequence: AAG
  source 1..20: mol_type = other DNA
ctttacaaaaaattttgtaa

SEQ ID NO: 11673 - DNA, 20 bp, synthetic construct
  misc_feature 1..20: note = Description of Artificial Sequence: Synthetic oligonucleotide
  misc_feature 1..20: note = Target: ANGPTL4; (+) strand; PAM type: NRG; PAM sequence: AAG
  source 1..20: mol_type = other DNA
attttgtaaaagtaaaaaaa

SEQ ID NO: 11674 - DNA, 20 bp, synthetic construct
  misc_feature 1..20: note = Description of Artificial Sequence: Synthetic oligonucleotide
  misc_feature 1..20: note = Target: ANGPTL4; (+) strand; PAM type: NRG; PAM sequence: AGG
  source 1..20: mol_type = other DNA
ttttgtaaaagtaaaaaaaa

SEQ ID NO: 11675 - DNA, 20 bp, synthetic construct
  misc_feature 1..20: note = Description of Artificial Sequence: Synthetic oligonucleotide
  misc_feature 1..20: note = Target: ANGPTL4; (+) strand; PAM type: NRG; PAM sequence: AAG
  source 1..20: mol_type = other DNA
taaaagtaaaaaaaaaggcc

SEQ ID NO: 11676 - DNA, 20 bp, synthetic construct
  misc_feature 1..20: note = Description of Artificial Sequence: Synthetic oligonucleotide
  misc_feature 1..20: note = Target: ANGPTL4; (+) strand; PAM type: NRG; PAM sequence: CAG
  source 1..20: mol_type = other DNA
gtaaaaaaaaaggccaagtg

SEQ ID NO: 11677 - DNA, 20 bp, synthetic construct
  misc_feature 1..20: note = Description of Artificial Sequence: Synthetic oligonucleotide
  misc_feature 1..20: note = Target: ANGPTL4; (+) strand; PAM type: NRG; PAM sequence: TGG
  source 1..20: mol_type = other DNA
aaaaaaaaggccaagtgcag

SEQ ID NO: 11678 - DNA, 20 bp, synthetic construct
  misc_feature 1..20: note = Description of Artificial Sequence: Synthetic oligonucleotide
  misc_feature 1..20: note = Target: ANGPTL4; (+) strand; PAM type: NRG; PAM sequence: CAG
  source 1..20: mol_type = other DNA
gtggctcacacctgtaatcc

SEQ ID NO: 11679 - DNA, 20 bp, synthetic construct
  misc_feature 1..20: note = Description of Artificial Sequence: Synthetic oligonucleotide
  misc_feature 1..20: note = Target: ANGPTL4; (+) strand; PAM type: NRG; PAM sequence: TGG
  source 1..20: mol_type = other DNA
cacctgtaatcccagcactt

SEQ ID NO: 11680 - DNA, 20 bp, synthetic construct
  misc_feature 1..20: note = Description of Artificial Sequence: Synthetic oligonucleotide
  misc_feature 1..20: note = Target: ANGPTL4; (+) strand; PAM type: NRG; PAM sequence: GGG
  source 1..20: mol_type = other DNA
acctgtaatcccagcacttt

SEQ ID NO: 11681 - DNA, 20 bp, synthetic construct
  misc_feature 1..20: note = Description of Artificial Sequence: Synthetic oligonucleotide
  misc_feature 1..20: note = Target: ANGPTL4; (+) strand; PAM type: NRG; PAM sequence: GAG
  source 1..20: mol_type = other DNA
ctgtaatcccagcactttgg

SEQ ID NO: 11682 - DNA, 20 bp, synthetic construct
  misc_feature 1..20: note = Description of Artificial Sequence: Synthetic oligonucleotide
  misc_feature 1..20: note = Target: ANGPTL4; (+) strand; PAM type: NRG; PAM sequence: AGG
  source 1..20: mol_type = other DNA
tgtaatcccagcactttggg

SEQ ID NO: 11683 - DNA, 20 bp, synthetic construct
  misc_feature 1..20: note = Description of Artificial Sequence: Synthetic oligonucleotide
  misc_feature 1..20: note = Target: ANGPTL4; (+) strand; PAM type: NRG; PAM sequence: GAG
  source 1..20: mol_type = other DNA
tcccagcactttgggaggtt

SEQ ID NO: 11684 - DNA, 20 bp, synthetic construct
  misc_feature 1..20: note = Description of Artificial Sequence: Synthetic oligonucleotide
  misc_feature 1..20: note = Target: ANGPTL4; (+) strand; PAM type: NRG; PAM sequence: AGG
  source 1..20: mol_type = other DNA
cccagcactttgggaggttg

SEQ ID NO: 11685 - DNA, 20 bp, synthetic construct
  misc_feature 1..20: note = Description of Artificial Sequence: Synthetic oligonucleotide
  misc_feature 1..20: note = Target: ANGPTL4; (+) strand; PAM type: NRG; PAM sequence: CAG
  source 1..20: mol_type = other DNA
agcactttgggaggttgagg

SEQ ID NO: 11686 - DNA, 20 bp, synthetic construct
  misc_feature 1..20: note = Description of Artificial Sequence: Synthetic oligonucleotide
  misc_feature 1..20: note = Target: ANGPTL4; (+) strand; PAM type: NRG; PAM sequence: CAG
  source 1..20: mol_type = other DNA
ctttgggaggttgaggcaga

SEQ ID NO: 11687 - DNA, 20 bp, synthetic construct
  misc_feature 1..20: note = Description of Artificial Sequence: Synthetic oligonucleotide
  misc_feature 1..20: note = Target: ANGPTL4; (+) strand; PAM type: NRG; PAM sequence: GAG
  source 1..20: mol_type = other DNA
ggttgaggcagacagatcac

SEQ ID NO: 11688 - DNA, 20 bp, synthetic construct
  misc_feature 1..20: note = Description of Artificial Sequence: Synthetic oligonucleotide
  misc_feature 1..20: note = Target: ANGPTL4; (+) strand; PAM type: NRG; PAM sequence: AGG
  source 1..20: mol_type = other DNA
gttgaggcagacagatcacg

SEQ ID NO: 11689 - DNA, 20 bp, synthetic construct
  misc_feature 1..20: note = Description of Artificial Sequence: Synthetic oligonucleotide
  misc_feature 1..20: note = Target: ANGPTL4; (+) strand; PAM type: NRG; PAM sequence: CAG
  source 1..20: mol_type = other DNA
aggcagacagatcacgaggt

SEQ ID NO: 11690 - DNA, 20 bp, synthetic construct
  misc_feature 1..20: note = Description of Artificial Sequence: Synthetic oligonucleotide
  misc_feature 1..20: note = Target: ANGPTL4; (+) strand; PAM type: NRG; PAM sequence: AGG
  source 1..20: mol_type = other DNA
ggcagacagatcacgaggtc

SEQ ID NO: 11691 - DNA, 20 bp, synthetic construct
  misc_feature 1..20: note = Description of Artificial Sequence: Synthetic oligonucleotide
  misc_feature 1..20: note = Target: ANGPTL4; (+) strand; PAM type: NRG; PAM sequence: GAG
  source 1..20: mol_type = other DNA
cagacagatcacgaggtcag

SEQ ID NO: 11692 - DNA, 20 bp, synthetic construct
  misc_feature 1..20: note = Description of Artificial Sequence: Synthetic oligonucleotide
  misc_feature 1..20: note = Target: ANGPTL4; (+) strand; PAM type: NRG; PAM sequence: GAG
  source 1..20: mol_type = other DNA
gatcacgaggtcaggagttc

SEQ ID NO: 11693 - DNA, 20 bp, synthetic construct
  misc_feature 1..20: note = Description of Artificial Sequence: Synthetic oligonucleotide
  misc_feature 1..20: note = Target: ANGPTL4; (+) strand; PAM type: NRG; PAM sequence: CAG
  source 1..20: mol_type = other DNA
cgaggtcaggagttcgagac

SEQ ID NO: 11694 - DNA, 20 bp, synthetic construct
  misc_feature 1..20: note = Description of Artificial Sequence: Synthetic oligonucleotide
  misc_feature 1..20: note = Target: ANGPTL4; (+) strand; PAM type: NRG; PAM sequence: TGG
  source 1..20: mol_type = other DNA
cgagaccagcctgaccaaca

SEQ ID NO: 11695 - DNA, 20 bp, synthetic construct
  misc_feature 1..20: note = Description of Artificial Sequence: Synthetic oligonucleotide
  misc_feature 1..20: note = Target: ANGPTL4; (+) strand; PAM type: NRG; PAM sequence: TAG
  source 1..20: mol_type = other DNA
tctactaaaaatacaaaaat

SEQ ID NO: 11696 - DNA, 20 bp, synthetic construct
  misc_feature 1..20: note = Description of Artificial Sequence: Synthetic oligonucleotide
  misc_feature 1..20: note = Target: ANGPTL4; (+) strand; PAM type: NRG; PAM sequence: CGG
  source 1..20: mol_type = other DNA
ctaaaaatacaaaaattagc

SEQ ID NO: 11697 - DNA, 20 bp, synthetic construct
  misc_feature 1..20: note = Description of Artificial Sequence: Synthetic oligonucleotide
  misc_feature 1..20: note = Target: ANGPTL4; (+) strand; PAM type: NRG; PAM sequence: GGG
  source 1..20: mol_type = other DNA
taaaaatacaaaaattagcc

SEQ ID NO: 11698 - DNA, 20 bp, synthetic construct
  misc_feature 1..20: note = Description of Artificial Sequence: Synthetic oligonucleotide
  misc_feature 1..20: note = Target: ANGPTL4; (+) strand; PAM type: NRG; PAM sequence: TGG
  source 1..20: mol_type = other DNA
atacaaaaattagccgggca

SEQ ID NO: 11699 - DNA, 20 bp, synthetic construct
  misc_feature 1..20: note = Description of Artificial Sequence: Synthetic oligonucleotide
  misc_feature 1..20: note = Target: ANGPTL4; (+) strand; PAM type: NRG; PAM sequence: TGG
  source 1..20: mol_type = other DNA
caaaaattagccgggcatgg

SEQ ID NO: 11700 - DNA, 20 bp, synthetic construct
  misc_feature 1..20: note = Description of Artificial Sequence: Synthetic oligonucleotide
  misc_feature 1..20: note = Target: ANGPTL4; (+) strand; PAM type: NRG; PAM sequence: CAG
  source 1..20: mol_type = other DNA
gtggtgtgcacctgtaatcc

SEQ ID NO: 11701 - DNA, 20 bp, synthetic construct
  misc_feature 1..20: note = Description of Artificial Sequence: Synthetic oligonucleotide
  misc_feature 1..20: note = Target: ANGPTL4; (+) strand; PAM type: NRG; PAM sequence: CAG
  source 1..20: mol_type = other DNA
cacctgtaatcccagctact

SEQ ID NO: 11702 - DNA, 20 bp, synthetic construct
  misc_feature 1..20: note = Description of Artificial Sequence: Synthetic oligonucleotide
  misc_feature 1..20: note = Target: ANGPTL4; (+) strand; PAM type: NRG; PAM sequence: AGG
  source 1..20: mol_type = other DNA
acctgtaatcccagctactc

SEQ ID NO: 11703 - DNA, 20 bp, synthetic construct
  misc_feature 1..20: note = Description of Artificial Sequence: Synthetic oligonucleotide
  misc_feature 1..20: note = Target: ANGPTL4; (+) strand; PAM type: NRG; PAM sequence: TGG
  source 1..20: mol_type = other DNA
tgtaatcccagctactcagg

SEQ ID NO: 11704 - DNA, 20 bp, synthetic construct
  misc_feature 1..20: note = Description of Artificial Sequence: Synthetic oligonucleotide
  misc_feature 1..20: note = Target: ANGPTL4; (+) strand; PAM type: NRG; PAM sequence: GAG
  source 1..20: mol_type = other DNA
tcccagctactcaggtggct

SEQ ID NO: 11705 - DNA, 20 bp, synthetic construct
  misc_feature 1..20: note = Description of Artificial Sequence: Synthetic oligonucleotide
  misc_feature 1..20: note = Target: ANGPTL4; (+) strand; PAM type: NRG; PAM sequence: AGG
  source 1..20: mol_type = other DNA
cccagctactcaggtggctg

SEQ ID NO: 11706 - DNA, 20 bp, synthetic construct
  misc_feature 1..20: note = Description of Artificial Sequence: Synthetic oligonucleotide
  misc_feature 1..20: note = Target: ANGPTL4; (+) strand; PAM type: NRG; PAM sequence: CAG
  source 1..20: mol_type = other DNA
agctactcaggtggctgagg

SEQ ID NO: 11707 - DNA, 20 bp, synthetic construct
  misc_feature 1..20: note = Description of Artificial Sequence: Synthetic oligonucleotide
  misc_feature 1..20: note = Target: ANGPTL4; (+) strand; PAM type: NRG; PAM sequence: AGG
  source 1..20: mol_type = other DNA
gctactcaggtggctgaggc

SEQ ID NO: 11708 - DNA, 20 bp, synthetic construct
  misc_feature 1..20: note = Description of Artificial Sequence: Synthetic oligonucleotide
  misc_feature 1..20: note = Target: ANGPTL4; (+) strand; PAM type: NRG; PAM sequence: GAG
  source 1..20: mol_type = other DNA
tactcaggtggctgaggcag

SEQ ID NO: 11709 - DNA, 20 bp, synthetic construct
  misc_feature 1..20: note = Description of Artificial Sequence: Synthetic oligonucleotide
  misc_feature 1..20: note = Target: ANGPTL4; (+) strand; PAM type: NRG; PAM sequence: TGG
  source 1..20: mol_type = other DNA
gcaggagaatctcttgaacc

SEQ ID NO: 11710 - DNA, 20 bp, synthetic construct
  misc_feature 1..20: note = Description of Artificial Sequence: Synthetic oligonucleotide
  misc_feature 1..20: note = Target: ANGPTL4; (+) strand; PAM type: NRG; PAM sequence: GGG
  source 1..20: mol_type = other DNA
caggagaatctcttgaacct

SEQ ID NO: 11711 - DNA, 20 bp, synthetic construct
  misc_feature 1..20: note = Description of Artificial Sequence: Synthetic oligonucleotide
  misc_feature 1..20: note = Target: ANGPTL4; (+) strand; PAM type: NRG; PAM sequence: GAG
  source 1..20: mol_type = other DNA
ggagaatctcttgaacctgg

SEQ ID NO: 11712 - DNA, 20 bp, synthetic construct
  misc_feature 1..20: note = Description of Artificial Sequence: Synthetic oligonucleotide
  misc_feature 1..20: note = Target: ANGPTL4; (+) strand; PAM type: NRG; PAM sequence: AGG
  source 1..20: mol_type = other DNA
gagaatctcttgaacctggg

SEQ ID NO: 11713 - DNA, 20 bp, synthetic construct
  misc_feature 1..20: note = Description of Artificial Sequence: Synthetic oligonucleotide
  misc_feature 1..20: note = Target: ANGPTL4; (+) strand; PAM type: NRG; PAM sequence: CAG
  source 1..20: mol_type = other DNA
aatctcttgaacctgggagg

SEQ ID NO: 11714 - DNA, 20 bp, synthetic construct
  misc_feature 1..20: note = Description of Artificial Sequence: Synthetic oligonucleotide
  misc_feature 1..20: note = Target: ANGPTL4; (+) strand; PAM type: NRG; PAM sequence: GAG
  source 1..20: mol_type = other DNA
tctcttgaacctgggaggca

SEQ ID NO: 11715 - DNA, 20 bp, synthetic construct
  misc_feature 1..20: note = Description of Artificial Sequence: Synthetic oligonucleotide
  misc_feature 1..20: note = Target: ANGPTL4; (+) strand; PAM type: NRG; PAM sequence: AGG
  source 1..20: mol_type = other DNA
ctcttgaacctgggaggcag

SEQ ID NO: 11716 - DNA, 20 bp, synthetic construct
  misc_feature 1..20: note = Description of Artificial Sequence: Synthetic oligonucleotide
  misc_feature 1..20: note = Target: ANGPTL4; (+) strand; PAM type: NRG; PAM sequence: CAG
  source 1..20: mol_type = other DNA
aacctgggaggcagaggttg

SEQ ID NO: 11717 - DNA, 20 bp, synthetic construct
  misc_feature 1..20: note = Description of Artificial Sequence: Synthetic oligonucleotide
  misc_feature 1..20: note = Target: ANGPTL4; (+) strand; PAM type: NRG; PAM sequence: GAG
  source 1..20: mol_type = other DNA
tgggaggcagaggttgcagt

SEQ ID NO: 11718 - DNA, 20 bp, synthetic construct
  misc_feature 1..20: note = Description of Artificial Sequence: Synthetic oligonucleotide
  misc_feature 1..20: note = Target: ANGPTL4; (+) strand; PAM type: NRG; PAM sequence: GAG
  source 1..20: mol_type = other DNA
ggcagaggttgcagtgagct

SEQ ID NO: 11719 - DNA, 20 bp, synthetic construct
  misc_feature 1..20: note = Description of Artificial Sequence: Synthetic oligonucleotide
  misc_feature 1..20: note = Target: ANGPTL4; (+) strand; PAM type: NRG; PAM sequence: CAG
  source 1..20: mol_type = other DNA
gagatgacgccaccgcactc

SEQ ID NO: 11720 - DNA, 20 bp, synthetic construct
  misc_feature 1..20: note = Description of Artificial Sequence: Synthetic oligonucleotide
  misc_feature 1..20: note = Target: ANGPTL4; (+) strand; PAM type: NRG; PAM sequence: TGG
  source 1..20: mol_type = other DNA
gacgccaccgcactccagcc

SEQ ID NO: 11721 - DNA, 20 bp, synthetic construct
  misc_feature 1..20: note = Description of Artificial Sequence: Synthetic oligonucleotide
  misc_feature 1..20: note = Target: ANGPTL4; (+) strand; PAM type: NRG; PAM sequence: GGG
  source 1..20: mol_type = other DNA
acgccaccgcactccagcct

SEQ ID NO: 11722 - DNA, 20 bp, synthetic construct
  misc_feature 1..20: note = Description of Artificial Sequence: Synthetic oligonucleotide
  misc_feature 1..20: note = Target: ANGPTL4; (+) strand; PAM type: NRG; PAM sequence: CAG
  source 1..20: mol_type = other DNA
ccgcactccagcctgggcga

SEQ ID NO: 11723 - DNA, 20 bp, synthetic construct
  misc_feature 1..20: note = Description of Artificial Sequence: Synthetic oligonucleotide
  misc_feature 1..20: note = Target: ANGPTL4; (+) strand; PAM type: NRG; PAM sequence: GAG
  source 1..20: mol_type = other DNA
gcactccagcctgggcgaca

SEQ ID NO: 11724 - DNA, 20 bp, synthetic construct
  misc_feature 1..20: note = Description of Artificial Sequence: Synthetic oligonucleotide
  misc_feature 1..20: note = Target: ANGPTL4; (+) strand; PAM type: NRG; PAM sequence: GAG
  source 1..20: mol_type = other DNA
tccagcctgggcgacagagc

SEQ ID NO: 11725 - DNA, 20 bp, synthetic construct
  misc_feature 1..20: note = Description of Artificial Sequence: Synthetic oligonucleotide
  misc_feature 1..20: note = Target: ANGPTL4; (+) strand; PAM type: NRG; PAM sequence: AAG
  source 1..20: mol_type = other DNA
cccccatcaaaaaaataaaa

SEQ ID NO: 11726 - DNA, 20 bp, synthetic construct
  misc_feature 1..20: note = Description of Artificial Sequence: Synthetic oligonucleotide
  misc_feature 1..20: note = Target: ANGPTL4; (+) strand; PAM type: NRG; PAM sequence: GAG
  source 1..20: mol_type = other DNA
cccatcaaaaaaataaaaaa

SEQ ID NO: 11727 - DNA, 20 bp, synthetic construct
  misc_feature 1..20: note = Description of Artificial Sequence: Synthetic oligonucleotide
  misc_feature 1..20: note = Target: ANGPTL4; (+) strand; PAM type: NRG; PAM sequence: CAG
  source 1..20: mol_type = other DNA
aaataaaataaaataaaatt

SEQ ID NO: 11728 - DNA, 20 bp, synthetic construct
  misc_feature 1..20: note = Description of Artificial Sequence: Synthetic oligonucleotide
  misc_feature 1..20: note = Target: ANGPTL4; (+) strand; PAM type: NRG; PAM sequence: TGG
  source 1..20: mol_type = other DNA
aaataaaattcagcccttgc

SEQ ID NO: 11729 - DNA, 20 bp, synthetic construct
  misc_feature 1..20: note = Description of Artificial Sequence: Synthetic oligonucleotide
  misc_feature 1..20: note = Target: ANGPTL4; (+) strand; PAM type: NRG; PAM sequence: GGG
  source 1..20: mol_type = other DNA
aataaaattcagcccttgct

SEQ ID NO: 11730 - DNA, 20 bp, synthetic construct
  misc_feature 1..20: note = Description of Artificial Sequence: Synthetic oligonucleotide
  misc_feature 1..20: note = Target: ANGPTL4; (+) strand; PAM type: NRG; PAM sequence: TGG
  source 1..20: mol_type = other DNA
aattcagcccttgctgggca

SEQ ID NO: 11731 - DNA, 20 bp, synthetic construct
  misc_feature 1..20: note = Description of Artificial Sequence: Synthetic oligonucleotide
  misc_feature 1..20: note = Target: ANGPTL4; (+) strand; PAM type: NRG; PAM sequence: TGG
  source 1..20: mol_type = other DNA
tcagcccttgctgggcatgg

SEQ ID NO: 11732 - DNA, 20 bp, synthetic construct
  misc_feature 1..20: note = Description of Artificial Sequence: Synthetic oligonucleotide
  misc_feature 1..20: note = Target: ANGPTL4; (+) strand; PAM type: NRG; PAM sequence: TAG
  source 1..20: mol_type = other DNA
ggcatggtggcacatgcctg

SEQ ID NO: 11733 - DNA, 20 bp, synthetic construct
  misc_feature 1..20: note = Description of Artificial Sequence: Synthetic oligonucleotide
  misc_feature 1..20: note = Target: ANGPTL4; (+) strand; PAM type: NRG; PAM sequence: CAG
  source 1..20: mol_type = other DNA
gtggcacatgcctgtagtcc

SEQ ID NO: 11734 - DNA, 20 bp, synthetic construct
  misc_feature 1..20: note = Description of Artificial Sequence: Synthetic oligonucleotide
  misc_feature 1..20: note = Target: ANGPTL4; (+) strand; PAM type: NRG; PAM sequence: CGG
  source 1..20: mol_type = other DNA
tgcctgtagtcccagctact

SEQ ID NO: 11735 - DNA, 20 bp, synthetic construct
  misc_feature 1..20: note = Description of Artificial Sequence: Synthetic oligonucleotide
  misc_feature 1..20: note = Target: ANGPTL4; (+) strand; PAM type: NRG; PAM sequence: GGG
  source 1..20: mol_type = other DNA
gcctgtagtcccagctactc

SEQ ID NO: 11736 - DNA, 20 bp, synthetic construct
  misc_feature 1..20: note = Description of Artificial Sequence: Synthetic oligonucleotide
  misc_feature 1..20: note = Target: ANGPTL4; (+) strand; PAM type: NRG; PAM sequence: GAG
  source 1..20: mol_type = other DNA
ctgtagtcccagctactcgg

SEQ ID NO: 11737 - DNA, 20 bp, synthetic construct
  misc_feature 1..20: note = Description of Artificial Sequence: Synthetic oligonucleotide
  misc_feature 1..20: note = Target: ANGPTL4; (+) strand; PAM type: NRG; PAM sequence: AGG
  source 1..20: mol_type = other DNA
tgtagtcccagctactcggg

SEQ ID NO: 11738 - DNA, 20 bp, synthetic construct
  misc_feature 1..20: note = Description of Artificial Sequence: Synthetic oligonucleotide
  misc_feature 1..20: note = Target: ANGPTL4; (+) strand; PAM type: NRG; PAM sequence: AAG
  source 1..20: mol_type = other DNA
tcccagctactcgggaggcc

SEQ ID NO: 11739 - DNA, 20 bp, synthetic construct
  misc_feature 1..20: note = Description of Artificial Sequence: Synthetic oligonucleotide
  misc_feature 1..20: note = Target: ANGPTL4; (+) strand; PAM type: NRG; PAM sequence: AGG
  source 1..20: mol_type = other DNA
cccagctactcgggaggcca

SEQ ID NO: 11740 - DNA, 20 bp, synthetic construct
  misc_feature 1..20: note = Description of Artificial Sequence: Synthetic oligonucleotide
  misc_feature 1..20: note = Target: ANGPTL4; (+) strand; PAM type: NRG; PAM sequence: CAG
  source 1..20: mol_type = other DNA
agctactcgggaggccaagg

SEQ ID NO: 11741 - DNA, 20 bp, synthetic construct
  misc_feature 1..20: note = Description of Artificial Sequence: Synthetic oligonucleotide
  misc_feature 1..20: note = Target: ANGPTL4; (+) strand; PAM type: NRG; PAM sequence: AGG
  source 1..20: mol_type = other DNA
gctactcgggaggccaaggc

SEQ ID NO: 11742 - DNA, 20 bp, synthetic construct
  misc_feature 1..20: note = Description of Artificial Sequence: Synthetic oligonucleotide
  misc_feature 1..20: note = Target: ANGPTL4; (+) strand; PAM type: NRG; PAM sequence: GAG
  source 1..20: mol_type = other DNA
tactcgggaggccaaggcag

SEQ ID NO: 11743 - DNA, 20 bp, synthetic construct
  misc_feature 1..20: note = Description of Artificial Sequence: Synthetic oligonucleotide
  misc_feature 1..20: note = Target: ANGPTL4; (+) strand; PAM type: NRG; PAM sequence: AGG
  source 1..20: mol_type = other DNA
actcgggaggccaaggcagg

SEQ ID NO: 11744 - DNA, 20 bp, synthetic construct
  misc_feature 1..20: note = Description of Artificial Sequence: Synthetic oligonucleotide
  misc_feature 1..20: note = Target: ANGPTL4; (+) strand; PAM type: NRG; PAM sequence: GGG
  source 1..20: mol_type = other DNA
ctcgggaggccaaggcagga

SEQ ID NO: 11745 - DNA, 20 bp, synthetic construct
  misc_feature 1..20: note = Description of Artificial Sequence: Synthetic oligonucleotide
  misc_feature 1..20: note = Target: ANGPTL4; (+) strand; PAM type: NRG; PAM sequence: CAG
  source 1..20: mol_type = other DNA
ccaaggcaggagggtcactt

SEQ ID NO: 11746 - DNA, 20 bp, synthetic construct
  misc_feature 1..20: note = Description of Artificial Sequence: Synthetic oligonucleotide
  misc_feature 1..20: note = Target: ANGPTL4; (+) strand; PAM type: NRG; PAM sequence: CAG
  source 1..20: mol_type = other DNA
gcaggagggtcacttcagcc

SEQ ID NO: 11747 - DNA, 20 bp, synthetic construct
  misc_feature 1..20: note = Description of Artificial Sequence: Synthetic oligonucleotide
  misc_feature 1..20: note = Target: ANGPTL4; (+) strand; PAM type: NRG; PAM sequence: AGG
  source 1..20: mol_type = other DNA
caggagggtcacttcagccc

SEQ ID NO: 11748 - DNA, 20 bp, synthetic construct
  misc_feature 1..20: note = Description of Artificial Sequence: Synthetic oligonucleotide
  misc_feature 1..20: note = Target: ANGPTL4; (+) strand; PAM type: NRG; PAM sequence: GAG
  source 1..20: mol_type = other DNA
ggagggtcacttcagcccag

SEQ ID NO: 11749 - DNA, 20 bp, synthetic construct
  misc_feature 1..20: note = Description of Artificial Sequence: Synthetic oligonucleotide
  misc_feature 1..20: note = Target: ANGPTL4; (+) strand; PAM type: NRG; PAM sequence: AAG
  source 1..20: mol_type = other DNA
tcacttcagcccaggagtta

SEQ ID NO: 11750 - DNA, 20 bp, synthetic construct
  misc_feature 1..20: note = Description of Artificial Sequence: Synthetic oligonucleotide
  misc_feature 1..20: note = Target: ANGPTL4; (+) strand; PAM type: NRG; PAM sequence: AGG
  source 1..20: mol_type = other DNA
cacttcagcccaggagttaa

SEQ ID NO: 11751 - DNA, 20 bp, synthetic construct
  misc_feature 1..20: note = Description of Artificial Sequence: Synthetic oligonucleotide
  misc_feature 1..20: note = Target: ANGPTL4; (+) strand; PAM type: NRG; PAM sequence: GAG
  source 1..20: mol_type = other DNA
caggagttaaaggctgccgt

SEQ ID NO: 11752 - DNA, 20 bp, synthetic construct
  misc_feature 1..20: note = Description of Artificial Sequence: Synthetic oligonucleotide
  misc_feature 1..20: note = Target: ANGPTL4; (+) strand; PAM type: NRG; PAM sequence: TAG
  source 1..20: mol_type = other DNA
gccgtgatcacacctgtgaa

SEQ ID NO: 11753 - DNA, 20 bp, synthetic construct
  misc_feature 1..20: note = Description of Artificial Sequence: Synthetic oligonucleotide
  misc_feature 1..20: note = Target: ANGPTL4; (+) strand; PAM type: NRG; PAM sequence: TGG
  source 1..20: mol_type = other DNA
atagccaccgcactccaacc

SEQ ID NO: 11754 - DNA, 20 bp, synthetic construct
  misc_feature 1..20: note = Description of Artificial Sequence: Synthetic oligonucleotide
  misc_feature 1..20: note = Target: ANGPTL4; (+) strand; PAM type: NRG; PAM sequence: GGG
  source 1..20: mol_type = other DNA
tagccaccgcactccaacct

SEQ ID NO: 11755 - DNA, 20 bp, synthetic construct
  misc_feature 1..20: note = Description of Artificial Sequence: Synthetic oligonucleotide
  misc_feature 1..20: note = Target: ANGPTL4; (+) strand; PAM type: NRG; PAM sequence: AAG
  source 1..20: mol_type = other DNA
ctcgtttctaaaaaaaaaca

SEQ ID NO: 11756 - DNA, 20 bp, synthetic construct
  misc_feature 1..20: note = Description of Artificial Sequence: Synthetic oligonucleotide
  misc_feature 1..20: note = Target: ANGPTL4; (+) strand; PAM type: NRG; PAM sequence: AGG
  source 1..20: mol_type = other DNA
tcgtttctaaaaaaaaacaa

SEQ ID NO: 11757 - DNA, 20 bp, synthetic construct
  misc_feature 1..20: note = Description of Artificial Sequence: Synthetic oligonucleotide
  misc_feature 1..20: note = Target: ANGPTL4; (+) strand; PAM type: NRG; PAM sequence: GAG
  source 1..20: mol_type = other DNA
tctaaaaaaaaacaaaggct

SEQ ID NO: 11758 - DNA, 20 bp, synthetic construct
  misc_feature 1..20: note = Description of Artificial Sequence: Synthetic oligonucleotide
  misc_feature 1..20: note = Target: ANGPTL4; (+) strand; PAM type: NRG; PAM sequence: CGG
  source 1..20: mol_type = other DNA
aaaaaaacaaaggctgagca

SEQ ID NO: 11759 - DNA, 20 bp, synthetic construct
  misc_feature 1..20: note = Description of Artificial Sequence: Synthetic oligonucleotide
  misc_feature 1..20: note = Target: ANGPTL4; (+) strand; PAM type: NRG; PAM sequence: TGG
  source 1..20: mol_type = other DNA
aaaacaaaggctgagcacgg

SEQ ID NO: 11760 - DNA, 20 bp, synthetic construct
  misc_feature 1..20: note = Description of Artificial Sequence: Synthetic oligonucleotide
  misc_feature 1..20: note = Target: ANGPTL4; (+) strand; PAM type: NRG; PAM sequence: CAG
  source 1..20: mol_type = other DNA
gtggcttacacctgaaatgc

SEQ ID NO: 11761 - DNA, 20 bp, synthetic construct
  misc_feature 1..20: note = Description of Artificial Sequence: Synthetic oligonucleotide
  misc_feature 1..20: note = Target: ANGPTL4; (+) strand; PAM type: NRG; PAM sequence: TGG
  source 1..20: mol_type = other DNA
cacctgaaatgccagcactt

SEQ ID NO: 11762 - DNA, 20 bp, synthetic construct
  misc_feature 1..20: note = Description of Artificial Sequence: Synthetic oligonucleotide
  misc_feature 1..20: note = Target: ANGPTL4; (+) strand; PAM type: NRG; PAM sequence: GGG
  source 1..20: mol_type = other DNA
acctgaaatgccagcacttt

SEQ ID NO: 11763 - DNA, 20 bp, synthetic construct
  misc_feature 1..20: note = Description of Artificial Sequence: Synthetic oligonucleotide
  misc_feature 1..20: note = Target: ANGPTL4; (+) strand; PAM type: NRG; PAM sequence: GAG
  source 1..20: mol_type = other DNA
ctgaaatgccagcactttgg

SEQ ID NO: 11764 - DNA, 20 bp, synthetic construct
  misc_feature 1..20: note = Description of Artificial Sequence: Synthetic oligonucleotide
  misc_feature 1..20: note = Target: ANGPTL4; (+) strand; PAM type: NRG; PAM sequence: AGG
  source 1..20: mol_type = other DNA
tgaaatgccagcactttggg

SEQ ID NO: 11765 - DNA, 20 bp, synthetic construct
  misc_feature 1..20: note = Description of Artificial Sequence: Synthetic oligonucleotide
  misc_feature 1..20: note = Target: ANGPTL4; (+) strand; PAM type: NRG; PAM sequence: GAG
  source 1..20: mol_type = other DNA
tgccagcactttgggaggct

SEQ ID NO: 11766 - DNA, 20 bp, synthetic construct
  misc_feature 1..20: note = Description of Artificial Sequence: Synthetic oligonucleotide
  misc_feature 1..20: note = Target: ANGPTL4; (+) strand; PAM type: NRG; PAM sequence: AGG
  source 1..20: mol_type = other DNA
gccagcactttgggaggctg

SEQ ID NO: 11767 - DNA, 20 bp, synthetic construct
  misc_feature 1..20: note = Description of Artificial Sequence: Synthetic oligonucleotide
  misc_feature 1..20: note = Target: ANGPTL4; (+) strand; PAM type: NRG; PAM sequence: CGG
  source 1..20: mol_type = other DNA
agcactttgggaggctgagg

SEQ ID NO: 11768 - DNA, 20 bp, synthetic construct
  misc_feature 1..20: note = Description of Artificial Sequence: Synthetic oligonucleotide
  misc_feature 1..20: note = Target: ANGPTL4; (+) strand; PAM type: NRG; PAM sequence: GGG
  source 1..20: mol_type = other DNA
gcactttgggaggctgaggc

SEQ ID NO: 11769 - DNA, 20 bp, synthetic construct
  misc_feature 1..20: note = Description of Artificial Sequence: Synthetic oligonucleotide
  misc_feature 1..20: note = Target: ANGPTL4; (+) strand; PAM type: NRG; PAM sequence: GAG
  source 1..20: mol_type = other DNA
ctgaggcgggcaaatcactt

SEQ ID NO: 11770 - DNA, 20 bp, synthetic construct
  misc_feature 1..20: note = Description of Artificial Sequence: Synthetic oligonucleotide
  misc_feature 1..20: note = Target: ANGPTL4; (+) strand; PAM type: NRG; PAM sequence: AGG
  source 1..20: mol_type = other DNA
tgaggcgggcaaatcacttg

SEQ ID NO: 11771 - DNA, 20 bp, synthetic construct
  misc_feature 1..20: note = Description of Artificial Sequence: Synthetic oligonucleotide
  misc_feature 1..20: note = Target: ANGPTL4; (+) strand; PAM type: NRG; PAM sequence: CAG
  source 1..20: mol_type = other DNA
gcgggcaaatcacttgaggt

SEQ ID NO: 11772 - DNA, 20 bp, synthetic construct
  misc_feature 1..20: note = Description of Artificial Sequence: Synthetic oligonucleotide
  misc_feature 1..20: note = Target: ANGPTL4; (+) strand; PAM type: NRG; PAM sequence: AAG
  source 1..20: mol_type = other DNA
ggcaaatcacttgaggtcag

SEQ ID NO: 11773 - DNA, 20 bp, synthetic construct
  misc_feature 1..20: note = Description of Artificial Sequence: Synthetic oligonucleotide
  misc_feature 1..20: note = Target: ANGPTL4; (+) strand; PAM type: NRG; PAM sequence: AAG
  source 1..20: mol_type = other DNA
tcacttgaggtcagaagttc

SEQ ID NO: 11774 - DNA, 20 bp, synthetic construct
  misc_feature 1..20: note = Description of Artificial Sequence: Synthetic oligonucleotide
  misc_feature 1..20: note = Target: ANGPTL4; (+) strand; PAM type: NRG; PAM sequence: CAG
  source 1..20: mol_type = other DNA
tgaggtcagaagttcaagac

SEQ ID NO: 11775 - DNA, 20 bp, synthetic construct
  misc_feature 1..20: note = Description of Artificial Sequence: Synthetic oligonucleotide
  misc_feature 1..20: note = Target: ANGPTL4; (+) strand; PAM type: NRG; PAM sequence: TGG
  source 1..20: mol_type = other DNA
tcagaagttcaagaccagcc

SEQ ID NO: 11776 - DNA, 20 bp, synthetic construct
  misc_feature 1..20: note = Description of Artificial Sequence: Synthetic oligonucleotide
  misc_feature 1..20: note = Target: ANGPTL4; (+) strand; PAM type: NRG; PAM sequence: TGG
  source 1..20: mol_type = other DNA
caagaccagcctggccaaca

SEQ ID NO: 11777 - DNA, 20 bp, synthetic construct
  misc_feature 1..20: note = Description of Artificial Sequence: Synthetic oligonucleotide
  misc_feature 1..20: note = Target: ANGPTL4; (+) strand; PAM type: NRG; PAM sequence: TAG
  source 1..20: mol_type = other DNA
atctctaccaacataaacat

SEQ ID NO: 11778 - DNA, 20 bp, synthetic construct
  misc_feature 1..20: note = Description of Artificial Sequence: Synthetic oligonucleotide
  misc_feature 1..20: note = Target: ANGPTL4; (+) strand; PAM type: NRG; PAM sequence: CGG
  source 1..20: mol_type = other DNA
ctaccaacataaacattagc

SEQ ID NO: 11779 - DNA, 20 bp, synthetic construct
  misc_feature 1..20: note = Description of Artificial Sequence: Synthetic oligonucleotide
  misc_feature 1..20: note = Target: ANGPTL4; (+) strand; PAM type: NRG; PAM sequence: GGG
  source 1..20: mol_type = other DNA
taccaacataaacattagcc

SEQ ID NO: 11780 - DNA, 20 bp, synthetic construct
  misc_feature 1..20: note = Description of Artificial Sequence: Synthetic oligonucleotide
  misc_feature 1..20: note = Target: ANGPTL4; (+) strand; PAM type: NRG; PAM sequence: CAG
  source 1..20: mol_type = other DNA
gccgggcgtgcctgtgattc

SEQ ID NO: 11781 - DNA, 20 bp, synthetic construct
  misc_feature 1..20: note = Description of Artificial Sequence: Synthetic oligonucleotide
  misc_feature 1..20: note = Target: ANGPTL4; (+) strand; PAM type: NRG; PAM sequence: TGG
  source 1..20: mol_type = other DNA
cctgtgattccagctgcttg

SEQ ID NO: 11782 - DNA, 20 bp, synthetic construct
  misc_feature 1..20: note = Description of Artificial Sequence: Synthetic oligonucleotide
  misc_feature 1..20: note = Target: ANGPTL4; (+) strand; PAM type: NRG; PAM sequence: GGG
  source 1..20: mol_type = other DNA
ctgtgattccagctgcttgt

SEQ ID NO: 11783 - DNA, 20 bp, synthetic construct
  misc_feature 1..20: note = Description of Artificial Sequence: Synthetic oligonucleotide
  misc_feature 1..20: note = Target: ANGPTL4; (+) strand; PAM type: NRG; PAM sequence: GGG
  source 1..20: mol_type = other DNA
tgtgattccagctgcttgtg

SEQ ID NO: 11784 - DNA, 20 bp, synthetic construct
  misc_feature 1..20: note = Description of Artificial Sequence: Synthetic oligonucleotide
  misc_feature 1..20: note = Target: ANGPTL4; (+) strand; PAM type: NRG; PAM sequence: AAG
  source 1..20: mol_type = other DNA
tccagctgcttgtggggctg

SEQ ID NO: 11785 - DNA, 20 bp, synthetic construct
  misc_feature 1..20: note = Description of Artificial Sequence: Synthetic oligonucleotide
  misc_feature 1..20: note = Target: ANGPTL4; (+) strand; PAM type: NRG; PAM sequence: AAG
  source 1..20: mol_type = other DNA
tgcttgtggggctgaagcac

SEQ ID NO: 11786 - DNA, 20 bp, synthetic construct
  misc_feature 1..20: note = Description of Artificial Sequence: Synthetic oligonucleotide
  misc_feature 1..20: note = Target: ANGPTL4; (+) strand; PAM type: NRG; PAM sequence: GAG
  source 1..20: mol_type = other DNA
ctgaagcacaagaatcgctt

SEQ ID NO: 11787 - DNA, 20 bp, synthetic construct
  misc_feature 1..20: note = Description of Artificial Sequence: Synthetic oligonucleotide
  misc_feature 1..20: note = Target: ANGPTL4; (+) strand; PAM type: NRG; PAM sequence: AAG
  source 1..20: mol_type = other DNA
caagaatcgcttgagccccg

SEQ ID NO: 11788 - DNA, 20 bp, synthetic construct
  misc_feature 1..20: note = Description of Artificial Sequence: Synthetic oligonucleotide
  misc_feature 1..20: note = Target: ANGPTL4; (+) strand; PAM type: NRG; PAM sequence: AGG
  source 1..20: mol_type = other DNA
aagaatcgcttgagccccga

SEQ ID NO: 11789 - DNA, 20 bp, synthetic construct
  misc_feature 1..20: note = Description of Artificial Sequence: Synthetic oligonucleotide
  misc_feature 1..20: note = Target: ANGPTL4; (+) strand; PAM type: NRG; PAM sequence: CAG
  source 1..20: mol_type = other DNA
aatcgcttgagccccgaagg

SEQ ID NO: 11790 - DNA, 20 bp, synthetic construct
  misc_feature 1..20: note = Description of Artificial Sequence: Synthetic oligonucleotide
  misc_feature 1..20: note = Target: ANGPTL4; (+) strand; PAM type: NRG; PAM sequence: GAG
  source 1..20: mol_type = other DNA
tcgcttgagccccgaaggca

SEQ ID NO: 11791 - DNA, 20 bp, synthetic construct
  misc_feature 1..20: note = Description of Artificial Sequence: Synthetic oligonucleotide
  misc_feature 1..20: note = Target: ANGPTL4; (+) strand; PAM type: NRG; PAM sequence: AGG
  source 1..20: mol_type = other DNA
cgcttgagccccgaaggcag

SEQ ID NO: 11792 - DNA, 20 bp, synthetic construct
  misc_feature 1..20: note = Description of Artificial Sequence: Synthetic oligonucleotide
  misc_feature 1..20: note = Target: ANGPTL4; (+) strand; PAM type: NRG; PAM sequence: CAG
  source 1..20: mol_type = other DNA
agccccgaaggcagaggttg

SEQ ID NO: 11793 - DNA, 20 bp, synthetic construct
  misc_feature 1..20: note = Description of Artificial Sequence: Synthetic oligonucleotide
  misc_feature 1..20: note = Target: ANGPTL4; (+) strand; PAM type: NRG; PAM sequence: GAG
  source 1..20: mol_type = other DNA
ccgaaggcagaggttgcagt

SEQ ID NO: 11794 - DNA, 20 bp, synthetic construct
  misc_feature 1..20: note = Description of Artificial Sequence: Synthetic oligonucleotide
  misc_feature 1..20: note = Target: ANGPTL4; (+) strand; PAM type: NRG; PAM sequence: GAG
  source 1..20: mol_type = other DNA
ggcagaggttgcagtgagct

SEQ ID NO: 11795 - DNA, 20 bp, synthetic construct
  misc_feature 1..20: note = Description of Artificial Sequence: Synthetic oligonucleotide
  misc_feature 1..20: note = Target: ANGPTL4; (+) strand; PAM type: NRG; PAM sequence: CGG
  source 1..20: mol_type = other DNA
gttgcagtgagctgagattg

SEQ ID NO: 11796 - DNA, 20 bp, synthetic construct
  misc_feature 1..20: note = Description of Artificial Sequence: Synthetic oligonucleotide
  misc_feature 1..20: note = Target: ANGPTL4; (+) strand; PAM type: NRG; PAM sequence: CAG
  source 1..20: mol_type = other DNA
gagattgcggcactgcgatc

SEQ ID NO: 11797 - DNA, 20 bp, synthetic construct
  misc_feature 1..20: note = Description of Artificial Sequence: Synthetic oligonucleotide
  misc_feature 1..20: note = Target: ANGPTL4; (+) strand; PAM type: NRG; PAM sequence: TGG
  source 1..20: mol_type = other DNA
tgcggcactgcgatccagcc

SEQ ID NO: 11798 - DNA, 20 bp, synthetic construct
  misc_feature 1..20: note = Description of Artificial Sequence: Synthetic oligonucleotide
  misc_feature 1..20: note = Target: ANGPTL4; (+) strand; PAM type: NRG; PAM sequence: GGG
  source 1..20: mol_type = other DNA
gcggcactgcgatccagcct

SEQ ID NO: 11799 - DNA, 20 bp, synthetic construct
  misc_feature 1..20: note = Description of Artificial Sequence: Synthetic oligonucleotide
  misc_feature 1..20: note = Target: ANGPTL4; (+) strand; PAM type: NRG; PAM sequence: CAG
  source 1..20: mol_type = other DNA
ctgcgatccagcctgggcaa

SEQ ID NO: 11800 - DNA, 20 bp, synthetic construct
  misc_feature 1..20: note = Description of Artificial Sequence: Synthetic oligonucleotide
  misc_feature 1..20: note = Target: ANGPTL4; (+) strand; PAM type: NRG; PAM sequence: GAG
  source 1..20: mol_type = other DNA
gcgatccagcctgggcaaca

SEQ ID NO: 11801 - DNA, 20 bp, synthetic construct
  misc_feature 1..20: note = Description of Artificial Sequence: Synthetic oligonucleotide
  misc_feature 1..20: note = Target: ANGPTL4; (+) strand; PAM type: NRG; PAM sequence: GAG
  source 1..20: mol_type = other DNA
tccagcctgggcaacagagt

SEQ ID NO: 11802 - DNA, 20 bp, synthetic construct
  misc_feature 1..20: note = Description of Artificial Sequence: Synthetic oligonucleotide
  misc_feature 1..20: note = Target: ANGPTL4; (+) strand; PAM type: NRG; PAM sequence: AAG
  source 1..20: mol_type = other DNA
taaaaaaaaaaaaaaaaaaa

SEQ ID NO: 11803 - DNA, 20 bp, synthetic construct
  misc_feature 1..20: note = Description of Artificial Sequence: Synthetic oligonucleotide
  misc_feature 1..20: note = Target: ANGPTL4; (+) strand; PAM type: NRG; PAM sequence: AAG
  source 1..20: mol_type = other DNA
aaaaaaaaaaaaaaaaaaga

SEQ ID NO: 11804 - DNA, 20 bp, synthetic construct
  misc_feature 1..20: note = Description of Artificial Sequence: Synthetic oligonucleotide
  misc_feature 1..20: note = Target: ANGPTL4; (+) strand; PAM type: NRG; PAM sequence: GAG
  source 1..20: mol_type = other DNA
agaaagcttttttttccact

SEQ ID NO: 11805 - DNA, 20 bp, synthetic construct
  misc_feature 1..20: note = Description of Artificial Sequence: Synthetic oligonucleotide
  misc_feature 1..20: note = Target: ANGPTL4; (+) strand; PAM type: NRG; PAM sequence: AAG
  source 1..20: mol_type = other DNA
aagcttttttttccactgag

SEQ ID NO: 11806 - DNA, 20 bp, synthetic construct
  misc_feature 1..20: note = Description of Artificial Sequence: Synthetic oligonucleotide
  misc_feature 1..20: note = Target: ANGPTL4; (+) strand; PAM type: NRG; PAM sequence: AAG
  source 1..20: mol_type = other DNA
tgagaagtcctttccattac

SEQ ID NO: 11807 - DNA, 20 bp, synthetic construct
  misc_feature 1..20: note = Description of Artificial Sequence: Synthetic oligonucleotide
  misc_feature 1..20: note = Target: ANGPTL4; (+) strand; PAM type: NRG; PAM sequence: GAG
  source 1..20: mol_type = other DNA
agaagtcctttccattacaa

SEQ ID NO: 11808 - DNA, 20 bp, synthetic construct
  misc_feature 1..20: note = Description of Artificial Sequence: Synthetic oligonucleotide
  misc_feature 1..20: note = Target: ANGPTL4; (+) strand; PAM type: NRG; PAM sequence: AGG
  source 1..20: mol_type = other DNA
gaagtcctttccattacaag

SEQ ID NO: 11809 - DNA, 20 bp, synthetic construct
  misc_feature 1..20: note = Description of Artificial Sequence: Synthetic oligonucleotide
  misc_feature 1..20: note = Target: ANGPTL4; (+) strand; PAM type: NRG; PAM sequence: CGG
  source 1..20: mol_type = other DNA
cattacaagaggttacaaca

SEQ ID NO: 11810 - DNA, 20 bp, synthetic construct
  misc_feature 1..20: note = Description of Artificial Sequence: Synthetic oligonucleotide
  misc_feature 1..20: note = Target: ANGPTL4; (+) strand; PAM type: NRG; PAM sequence: GGG
  source 1..20: mol_type = other DNA
attacaagaggttacaacac

SEQ ID NO: 11811 - DNA, 20 bp, synthetic construct
  misc_feature 1..20: note = Description of Artificial Sequence: Synthetic oligonucleotide
  misc_feature 1..20: note = Target: ANGPTL4; (+) strand; PAM type: NRG; PAM sequence: GGG
  source 1..20: mol_type = other DNA
ttacaagaggttacaacacg

SEQ ID NO: 11812 - DNA, 20 bp, synthetic construct
  misc_feature 1..20: note = Description of Artificial Sequence: Synthetic oligonucleotide
  misc_feature 1..20: note = Target: ANGPTL4; (+) strand; PAM type: NRG; PAM sequence: CAG
  source 1..20: mol_type = other DNA
ttacaacacggggttttacc

SEQ ID NO: 11813 - DNA, 20 bp, synthetic construct
  misc_feature 1..20: note = Description of Artificial Sequence: Synthetic oligonucleotide
  misc_feature 1..20: note = Target: ANGPTL4; (+) strand; PAM type: NRG; PAM sequence: CAG
  source 1..20: mol_type = other DNA
acacggggttttacccagtt

SEQ ID NO: 11814 - DNA, 20 bp, synthetic construct
  misc_feature 1..20: note = Description of Artificial Sequence: Synthetic oligonucleotide
  misc_feature 1..20: note = Target: ANGPTL4; (+) strand; PAM type: NRG; PAM sequence: TGG
  source 1..20: mol_type = other DNA
ggggttttacccagttcagc

SEQ ID NO: 11815 - DNA, 20 bp, synthetic construct
  misc_feature 1..20: note = Description of Artificial Sequence: Synthetic oligonucleotide
  misc_feature 1..20: note = Target: ANGPTL4; (+) strand; PAM type: NRG; PAM sequence: CAG
  source 1..20: mol_type = other DNA
tttacccagttcagctggcc

SEQ ID NO: 11816 - DNA, 20 bp, synthetic construct
  misc_feature 1..20: note = Description of Artificial Sequence: Synthetic oligonucleotide
  misc_feature 1..20: note = Target: ANGPTL4; (+) strand; PAM type: NRG; PAM sequence: GAG
  source 1..20: mol_type = other DNA
tacccagttcagctggccca

SEQ ID NO: 11817 - DNA, 20 bp, synthetic construct
  misc_feature 1..20: note = Description of Artificial Sequence: Synthetic oligonucleotide
  misc_feature 1..20: note = Target: ANGPTL4; (+) strand; PAM type: NRG; PAM sequence: GAG
  source 1..20: mol_type = other DNA
cccagttcagctggcccaga

SEQ ID NO: 11818 - DNA, 20 bp, synthetic construct
  misc_feature 1..20: note = Description of Artificial Sequence: Synthetic oligonucleotide
  misc_feature 1..20: note = Target: ANGPTL4; (+) strand; PAM type: NRG; PAM sequence: AGG
  source 1..20: mol_type = other DNA
ccagttcagctggcccagag

SEQ ID NO: 11819 - DNA, 20 bp, synthetic construct
  misc_feature 1..20: note = Description of Artificial Sequence: Synthetic oligonucleotide
  misc_feature 1..20: note = Target: ANGPTL4; (+) strand; PAM type: NRG; PAM sequence: CAG
  source 1..20: mol_type = other DNA
gctggcccagagaggctttg

SEQ ID NO: 11820 - DNA, 20 bp, synthetic construct
  misc_feature 1..20: note = Description of Artificial Sequence: Synthetic oligonucleotide
  misc_feature 1..20: note = Target: ANGPTL4; (+) strand; PAM type: NRG; PAM sequence: CAG
  source 1..20: mol_type = other DNA
tgcctactccctcccacact

SEQ ID NO: 11821 - DNA, 20 bp, synthetic construct
  misc_feature 1..20: note = Description of Artificial Sequence: Synthetic oligonucleotide
  misc_feature 1..20: note = Target: ANGPTL4; (+) strand; PAM type: NRG; PAM sequence: TGG
  source 1..20: mol_type = other DNA
ctcccacactcagtccctgc

SEQ ID NO: 11822 - DNA, 20 bp, synthetic construct
  misc_feature 1..20: note = Description of Artificial Sequence: Synthetic oligonucleotide
  misc_feature 1..20: note = Target: ANGPTL4; (+) strand; PAM type: NRG; PAM sequence: GGG
  source 1..20: mol_type = other DNA
tcccacactcagtccctgct

SEQ ID NO: 11823 - DNA, 20 bp, synthetic construct
  misc_feature 1..20: note = Description of Artificial Sequence: Synthetic oligonucleotide
  misc_feature 1..20: note = Target: ANGPTL4; (+) strand; PAM type: NRG; PAM sequence: TGG
  source 1..20: mol_type = other DNA
ctcagtccctgctgggttct

SEQ ID NO: 11824 - DNA, 20 bp, synthetic construct
  misc_feature 1..20: note = Description of Artificial Sequence: Synthetic oligonucleotide
  misc_feature 1..20: note = Target: ANGPTL4; (+) strand; PAM type: NRG; PAM sequence: GGG
  source 1..20: mol_type = other DNA
tcagtccctgctgggttctt

SEQ ID NO: 11825 - DNA, 20 bp, synthetic construct
  misc_feature 1..20: note = Description of Artificial Sequence: Synthetic oligonucleotide
  misc_feature 1..20: note = Target: ANGPTL4; (+) strand; PAM type: NRG; PAM sequence: AAG
  source 1..20: mol_type = other DNA
cctgctgggttcttgggaca

SEQ ID NO: 11826 - DNA, 20 bp, synthetic construct
  misc_feature 1..20: note = Description of Artificial Sequence: Synthetic oligonucleotide
  misc_feature 1..20: note = Target: ANGPTL4; (+) strand; PAM type: NRG; PAM sequence: AAG
  source 1..20: mol_type = other DNA
cttgggacaaagatcttccc

SEQ ID NO: 11827 - DNA, 20 bp, synthetic construct
  misc_feature 1..20: note = Description of Artificial Sequence: Synthetic oligonucleotide
  misc_feature 1..20: note = Target: ANGPTL4; (+) strand; PAM type: NRG; PAM sequence: AGG
  source 1..20: mol_type = other DNA
ttgggacaaagatcttccca

SEQ ID NO: 11828 - DNA, 20 bp, synthetic construct
  misc_feature 1..20: note = Description of Artificial Sequence: Synthetic oligonucleotide
  misc_feature 1..20: note = Target: ANGPTL4; (+) strand; PAM type: NRG; PAM sequence: CAG
  source 1..20: mol_type = other DNA
gacaaagatcttcccaaggc

SEQ ID NO: 11829 - DNA, 20 bp, synthetic construct
  misc_feature 1..20: note = Description of Artificial Sequence: Synthetic oligonucleotide
  misc_feature 1..20: note = Target: ANGPTL4; (+) strand; PAM type: NRG; PAM sequence: GAG
  source 1..20: mol_type = other DNA
ccctctgacccaccctcctc

SEQ ID NO: 11830 - DNA, 20 bp, synthetic construct
  misc_feature 1..20: note = Description of Artificial Sequence: Synthetic oligonucleotide
  misc_feature 1..20: note = Target: ANGPTL4; (+) strand; PAM type: NRG; PAM sequence: CAG
  source 1..20: mol_type = other DNA
cccaccctcctcgagtcctc

SEQ ID NO: 11831 - DNA, 20 bp, synthetic construct
  misc_feature 1..20: note = Description of Artificial Sequence: Synthetic oligonucleotide
  misc_feature 1..20: note = Target: ANGPTL4; (+) strand; PAM type: NRG; PAM sequence: AGG
  source 1..20: mol_type = other DNA
ccaccctcctcgagtcctcc

SEQ ID NO: 11832 - DNA, 20 bp, synthetic construct
  misc_feature 1..20: note = Description of Artificial Sequence: Synthetic oligonucleotide
  misc_feature 1..20: note = Target: ANGPTL4; (+) strand; PAM type: NRG; PAM sequence: GGG
  source 1..20: mol_type = other DNA
caccctcctcgagtcctcca

SEQ ID NO: 11833 - DNA, 20 bp, synthetic construct
  misc_feature 1..20: note = Description of Artificial Sequence: Synthetic oligonucleotide
  misc_feature 1..20: note = Target: ANGPTL4; (+) strand; PAM type: NRG; PAM sequence: GAG
  source 1..20: mol_type = other DNA
tcctcgagtcctccagggat

SEQ ID NO: 11834 - DNA, 20 bp, synthetic construct
  misc_feature 1..20: note = Description of Artificial Sequence: Synthetic oligonucleotide
  misc_feature 1..20: note = Target: ANGPTL4; (+) strand; PAM type: NRG; PAM sequence: GAG
  source 1..20: mol_type = other DNA
cgagtcctccagggatgagt

SEQ ID NO: 11835 - DNA, 20 bp, synthetic construct
  misc_feature 1..20: note = Description of Artificial Sequence: Synthetic oligonucleotide
  misc_feature 1..20: note = Target: ANGPTL4; (+) strand; PAM type: NRG; PAM sequence: AGG
  source 1..20: mol_type = other DNA
gagtcctccagggatgagtg

SEQ ID NO: 11836 - DNA, 20 bp, synthetic construct
  misc_feature 1..20: note = Description of Artificial Sequence: Synthetic oligonucleotide
  misc_feature 1..20: note = Target: ANGPTL4; (+) strand; PAM type: NRG; PAM sequence: GGG
  source 1..20: mol_type = other DNA
agtcctccagggatgagtga

SEQ ID NO: 11837 - DNA, 20 bp, synthetic construct
  misc_feature 1..20: note = Description of Artificial Sequence: Synthetic oligonucleotide
  misc_feature 1..20: note = Target: ANGPTL4; (+) strand; PAM type: NRG; PAM sequence: GAG
  source 1..20: mol_type = other DNA
tcctccagggatgagtgagg

SEQ ID NO: 11838 - DNA, 20 bp, synthetic construct
  misc_feature 1..20: note = Description of Artificial Sequence: Synthetic oligonucleotide
  misc_feature 1..20: note = Target: ANGPTL4; (+) strand; PAM type: NRG; PAM sequence: TGG
  source 1..20: mol_type = other DNA
tgagggagctgctgtcttcc

SEQ ID NO: 11839 - DNA, 20 bp, synthetic construct
  misc_feature 1..20: note = Description of Artificial Sequence: Synthetic oligonucleotide
  misc_feature 1..20: note = Target: ANGPTL4; (+) strand; PAM type: NRG; PAM sequence: GGG
  source 1..20: mol_type = other DNA
gagggagctgctgtcttcct

SEQ ID NO: 11840 - DNA, 20 bp, synthetic construct
  misc_feature 1..20: note = Description of Artificial Sequence: Synthetic oligonucleotide
  misc_feature 1..20: note = Target: ANGPTL4; (+) strand; PAM type: NRG; PAM sequence: TGG
  source 1..20: mol_type = other DNA
agctgctgtcttcctgggtt

SEQ ID NO: 11841 - DNA, 20 bp, synthetic construct
  misc_feature 1..20: note = Description of Artificial Sequence: Synthetic oligonucleotide
  misc_feature 1..20: note = Target: ANGPTL4; (+) strand; PAM type: NRG; PAM sequence: GAG
  source 1..20: mol_type = other DNA
ctgctgtcttcctgggtttg

SEQ ID NO: 11842 - DNA, 20 bp, synthetic construct
  misc_feature 1..20: note = Description of Artificial Sequence: Synthetic oligonucleotide
  misc_feature 1..20: note = Target: ANGPTL4; (+) strand; PAM type: NRG; PAM sequence: AGG
  source 1..20: mol_type = other DNA
tgctgtcttcctgggtttgg

SEQ ID NO: 11843 - DNA, 20 bp, synthetic construct
  misc_feature 1..20: note = Description of Artificial Sequence: Synthetic oligonucleotide
  misc_feature 1..20: note = Target: ANGPTL4; (+) strand; PAM type: NRG; PAM sequence: GGG
  source 1..20: mol_type = other DNA
gctgtcttcctgggtttgga

SEQ ID NO: 11844 - DNA, 20 bp, synthetic construct
  misc_feature 1..20: note = Description of Artificial Sequence: Synthetic oligonucleotide
  misc_feature 1..20: note = Target: ANGPTL4; (+) strand; PAM type: NRG; PAM sequence: GGG
  source 1..20: mol_type = other DNA
ctgtcttcctgggtttggag

SEQ ID NO: 11845 - DNA, 20 bp, synthetic construct
  misc_feature 1..20: note = Description of Artificial Sequence: Synthetic oligonucleotide
  misc_feature 1..20: note = Target: ANGPTL4; (+) strand; PAM type: NRG; PAM sequence: GGG
  source 1..20: mol_type = other DNA
tgtcttcctgggtttggagg

SEQ ID NO: 11846 - DNA, 20 bp, synthetic construct
  misc_feature 1..20: note = Description of Artificial Sequence: Synthetic oligonucleotide
  misc_feature 1..20: note = Target: ANGPTL4; (+) strand; PAM type: NRG; PAM sequence: TGG
  source 1..20: mol_type = other DNA
tcctgggtttggagggggtt

SEQ ID NO: 11847 - DNA, 20 bp, synthetic construct
  misc_feature 1..20: note = Description of Artificial Sequence: Synthetic oligonucleotide
  misc_feature 1..20: note = Target: ANGPTL4; (+) strand; PAM type: NRG; PAM sequence: TGG
  source 1..20: mol_type = other DNA
tttggagggggtttggtgct

SEQ ID NO: 11848 - DNA, 20 bp, synthetic construct
  misc_feature 1..20: note = Description of Artificial Sequence: Synthetic oligonucleotide
  misc_feature 1..20: note = Target: ANGPTL4; (+) strand; PAM type: NRG; PAM sequence: CAG
  source 1..20: mol_type = other DNA
ggagggggtttggtgcttgg

SEQ ID NO: 11849 - DNA, 20 bp, synthetic construct
  misc_feature 1..20: note = Description of Artificial Sequence: Synthetic oligonucleotide
  misc_feature 1..20: note = Target: ANGPTL4; (+) strand; PAM type: NRG; PAM sequence: CAG
  source 1..20: mol_type = other DNA
ggggtttggtgcttggcagc

SEQ ID NO: 11850 - DNA, 20 bp, synthetic construct
  misc_feature 1..20: note = Description of Artificial Sequence: Synthetic oligonucleotide
  misc_feature 1..20: note = Target: ANGPTL4; (+) strand; PAM type: NRG; PAM sequence: GAG
  source 1..20: mol_type = other DNA
ttggtgcttggcagccagat

SEQ ID NO: 11851 - DNA, 20 bp, synthetic construct
  misc_feature 1..20: note = Description of Artificial Sequence: Synthetic oligonucleotide
  misc_feature 1..20: note = Target: ANGPTL4; (+) strand; PAM type: NRG; PAM sequence: AGG
  source 1..20: mol_type = other DNA
tggtgcttggcagccagatg

SEQ ID NO: 11852 - DNA, 20 bp, synthetic construct
  misc_feature 1..20: note = Description of Artificial Sequence: Synthetic oligonucleotide
  misc_feature 1..20: note = Target: ANGPTL4; (+) strand; PAM type: NRG; PAM sequence: GGG
  source 1..20: mol_type = other DNA
ggtgcttggcagccagatga

SEQ ID NO: 11853 - DNA, 20 bp, synthetic construct
  misc_feature 1..20: note = Description of Artificial Sequence: Synthetic oligonucleotide
  misc_feature 1..20: note = Target: ANGPTL4; (+) strand; PAM type: NRG; PAM sequence: GAG
  source 1..20: mol_type = other DNA
tgcttggcagccagatgagg

SEQ ID NO: 11854 - DNA, 20 bp, synthetic construct
  misc_feature 1..20: note = Description of Artificial Sequence: Synthetic oligonucleotide
  misc_feature 1..20: note = Target: ANGPTL4; (+) strand; PAM type: NRG; PAM sequence: TGG
  source 1..20: mol_type = other DNA
ttggcagccagatgagggag

SEQ ID NO: 11855 - DNA, 20 bp, synthetic construct
  misc_feature 1..20: note = Description of Artificial Sequence: Synthetic oligonucleotide
  misc_feature 1..20: note = Target: ANGPTL4; (+) strand; PAM type: NRG; PAM sequence: GGG
  source 1..20: mol_type = other DNA
tggcagccagatgagggagt

SEQ ID NO: 11856 - DNA, 20 bp, synthetic construct
  misc_feature 1..20: note = Description of Artificial Sequence: Synthetic oligonucleotide
  misc_feature 1..20: note = Target: ANGPTL4; (+) strand; PAM type: NRG; PAM sequence: GGG
  source 1..20: mol_type = other DNA
ggcagccagatgagggagtg

SEQ ID NO: 11857 - DNA, 20 bp, synthetic construct
  misc_feature 1..20: note = Description of Artificial Sequence: Synthetic oligonucleotide
  misc_feature 1..20: note = Target: ANGPTL4; (+) strand; PAM type: NRG; PAM sequence: AAG
  source 1..20: mol_type = other DNA
agggagtggggtcgtctgtg

SEQ ID NO: 11858 - DNA, 20 bp, synthetic construct
  misc_feature 1..20: note = Description of Artificial Sequence: Synthetic oligonucleotide
  misc_feature 1..20: note = Target: ANGPTL4; (+) strand; PAM type: NRG; PAM sequence: GAG
  source 1..20: mol_type = other DNA
ggagtggggtcgtctgtgaa

SEQ ID NO: 11859 - DNA, 20 bp, synthetic construct
  misc_feature 1..20: note = Description of Artificial Sequence: Synthetic oligonucleotide
  misc_feature 1..20: note = Target: ANGPTL4; (+) strand; PAM type: NRG; PAM sequence: AGG
  source 1..20: mol_type = other DNA
gagtggggtcgtctgtgaag

SEQ ID NO: 11860 - DNA, 20 bp, synthetic construct
  misc_feature 1..20: note = Description of Artificial Sequence: Synthetic oligonucleotide
  misc_feature 1..20: note = Target: ANGPTL4; (+) strand; PAM type: NRG; PAM sequence: GGG
  source 1..20: mol_type = other DNA
agtggggtcgtctgtgaaga

SEQ ID NO: 11861 - DNA, 20 bp, synthetic construct
  misc_feature 1..20: note = Description of Artificial Sequence: Synthetic oligonucleotide
  misc_feature 1..20: note = Target: ANGPTL4; (+) strand; PAM type: NRG; PAM sequence: TGG
  source 1..20: mol_type = other DNA
gtctgtgaagagggacttcc

SEQ ID NO: 11862 - DNA, 20 bp, synthetic construct
  misc_feature 1..20: note = Description of Artificial Sequence: Synthetic oligonucleotide
  misc_feature 1..20: note = Target: ANGPTL4; (+) strand; PAM type: NRG; PAM sequence: TGG
  source 1..20: mol_type = other DNA
ctggtgaccttgtacctttc

SEQ ID NO: 11863 - DNA, 20 bp, synthetic construct
  misc_feature 1..20: note = Description of Artificial Sequence: Synthetic oligonucleotide
  misc_feature 1..20: note = Target: ANGPTL4; (+) strand; PAM type: NRG; PAM sequence: GGG
  source 1..20: mol_type = other DNA
tggtgaccttgtacctttct

SEQ ID NO: 11864 - DNA, 20 bp, synthetic construct
  misc_feature 1..20: note = Description of Artificial Sequence: Synthetic oligonucleotide
  misc_feature 1..20: note = Target: ANGPTL4; (+) strand; PAM type: NRG; PAM sequence: CAG
  source 1..20: mol_type = other DNA
tgaccttgtacctttctggg

SEQ ID NO: 11865 - DNA, 20 bp, synthetic construct
  misc_feature 1..20: note = Description of Artificial Sequence: Synthetic oligonucleotide
  misc_feature 1..20: note = Target: ANGPTL4; (+) strand; PAM type: NRG; PAM sequence: TGG
  source 1..20: mol_type = other DNA
cttgtacctttctgggcaga

SEQ ID NO: 11866 - DNA, 20 bp, synthetic construct
  misc_feature 1..20: note = Description of Artificial Sequence: Synthetic oligonucleotide
  misc_feature 1..20: note = Target: ANGPTL4; (+) strand; PAM type: NRG; PAM sequence: GAG
  source 1..20: mol_type = other DNA
tgtacctttctgggcagatg

SEQ ID NO: 11867 - DNA, 20 bp, synthetic construct
  misc_feature 1..20: note = Description of Artificial Sequence: Synthetic oligonucleotide
  misc_feature 1..20: note = Target: ANGPTL4; (+) strand; PAM type: NRG; PAM sequence: AGG
  source 1..20: mol_type = other DNA
gtacctttctgggcagatgg

SEQ ID NO: 11868 - DNA, 20 bp, synthetic construct
  misc_feature 1..20: note = Description of Artificial Sequence: Synthetic oligonucleotide
  misc_feature 1..20: note = Target: ANGPTL4; (+) strand; PAM type: NRG; PAM sequence: TGG
  source 1..20: mol_type = other DNA
ctttctgggcagatggaggc

SEQ ID NO: 11869 - DNA, 20 bp, synthetic construct
  misc_feature 1..20: note = Description of Artificial Sequence: Synthetic oligonucleotide
  misc_feature 1..20: note = Target: ANGPTL4; (+) strand; PAM type: NRG; PAM sequence: CAG
  source 1..20: mol_type = other DNA
ctgggcagatggaggctgga

SEQ ID NO: 11870 - DNA, 20 bp, synthetic construct
  misc_feature 1..20: note = Description of Artificial Sequence: Synthetic oligonucleotide
  misc_feature 1..20: note = Target: ANGPTL4; (+) strand; PAM type: NRG; PAM sequence: CAG
  source 1..20: mol_type = other DNA
atggaggctggacagtaatt

SEQ ID NO: 11871 - DNA, 20 bp, synthetic construct
  misc_feature 1..20: note = Description of Artificial Sequence: Synthetic oligonucleotide
  misc_feature 1..20: note = Target: ANGPTL4; (+) strand; PAM type: NRG; PAM sequence: GAG
  source 1..20: mol_type = other DNA
ggaggctggacagtaattca

SEQ ID NO: 11872 - DNA, 20 bp, synthetic construct
  misc_feature 1..20: note = Description of Artificial Sequence: Synthetic oligonucleotide
  misc_feature 1..20: note = Target: ANGPTL4; (+) strand; PAM type: NRG; PAM sequence: AGG
  source 1..20: mol_type = other DNA
gaggctggacagtaattcag

SEQ ID NO: 11873 - DNA, 20 bp, synthetic construct
  misc_feature 1..20: note = Description of Artificial Sequence: Synthetic oligonucleotide
  misc_feature 1..20: note = Target: ANGPTL4; (+) strand; PAM type: NRG; PAM sequence: TGG
  source 1..20: mol_type = other DNA
gtaattcagaggcgccacga

SEQ ID NO: 11874 - DNA, 20 bp, synthetic construct
  misc_feature 1..20: note = Description of Artificial Sequence: Synthetic oligonucleotide
  misc_feature 1..20: note = Target: ANGPTL4; (+) strand; PAM type: NRG; PAM sequence: CAG
  source 1..20: mol_type = other DNA
tcagaggcgccacgatggct

SEQ ID NO: 11875 - DNA, 20 bp, synthetic construct
  misc_feature 1..20: note = Description of Artificial Sequence: Synthetic oligonucleotide
  misc_feature 1..20: note = Target: ANGPTL4; (+) strand; PAM type: NRG; PAM sequence: TGG
  source 1..20: mol_type = other DNA
gaggcgccacgatggctcag

SEQ ID NO: 11876 - DNA, 20 bp, synthetic construct
  misc_feature 1..20: note = Description of Artificial Sequence: Synthetic oligonucleotide
  misc_feature 1..20: note = Target: ANGPTL4; (+) strand; PAM type: NRG; PAM sequence: CGG
  source 1..20: mol_type = other DNA
atggctcagtggacttcaac

SEQ ID NO: 11877 - DNA, 20 bp, synthetic construct
  misc_feature 1..20: note = Description of Artificial Sequence: Synthetic oligonucleotide
  misc_feature 1..20: note = Target: ANGPTL4; (+) strand; PAM type: NRG; PAM sequence: TGG
  source 1..20: mol_type = other DNA
cagtggacttcaaccggccc

SEQ ID NO: 11878 - DNA, 20 bp, synthetic construct
  misc_feature 1..20: note = Description of Artificial Sequence: Synthetic oligonucleotide
  misc_feature 1..20: note = Target: ANGPTL4; (+) strand; PAM type: NRG; PAM sequence: GGG
  source 1..20: mol_type = other DNA
agtggacttcaaccggccct

SEQ ID NO: 11879 - DNA, 20 bp, synthetic construct
  misc_feature 1..20: note = Description of Artificial Sequence: Synthetic oligonucleotide
  misc_feature 1..20: note = Target: ANGPTL4; (+) strand; PAM type: NRG; PAM sequence: AAG
  source 1..20: mol_type = other DNA
ggacttcaaccggccctggg

SEQ ID NO: 11880 - DNA, 20 bp, synthetic construct
  misc_feature 1..20: note = Description of Artificial Sequence: Synthetic oligonucleotide
  misc_feature 1..20: note = Target: ANGPTL4; (+) strand; PAM type: NRG; PAM sequence: AAG
  source 1..20: mol_type = other DNA
accggccctgggaagcctac

SEQ ID NO: 11881 - DNA, 20 bp, synthetic construct
  misc_feature 1..20: note = Description of Artificial Sequence: Synthetic oligonucleotide
  misc_feature 1..20: note = Target: ANGPTL4; (+) strand; PAM type: NRG; PAM sequence: AGG
  source 1..20: mol_type = other DNA
ccggccctgggaagcctaca

SEQ ID NO: 11882 - DNA, 20 bp, synthetic construct
  misc_feature 1..20: note = Description of Artificial Sequence: Synthetic oligonucleotide
  misc_feature 1..20: note = Target: ANGPTL4; (+) strand; PAM type: NRG; PAM sequence: CGG
  source 1..20: mol_type = other DNA
gccctgggaagcctacaagg

SEQ ID NO: 11883 - DNA, 20 bp, synthetic construct
  misc_feature 1..20: note = Description of Artificial Sequence: Synthetic oligonucleotide
  misc_feature 1..20: note = Target: ANGPTL4; (+) strand; PAM type: NRG; PAM sequence: GGG
  source 1..20: mol_type = other DNA
ccctgggaagcctacaaggc

SEQ ID NO: 11884 - DNA, 20 bp, synthetic construct
  misc_feature 1..20: note = Description of Artificial Sequence: Synthetic oligonucleotide
  misc_feature 1..20: note = Target: ANGPTL4; (+) strand; PAM type: NRG; PAM sequence: GGG
  source 1..20: mol_type = other DNA
cctgggaagcctacaaggcg

SEQ ID NO: 11885 - DNA, 20 bp, synthetic construct
  misc_feature 1..20: note = Description of Artificial Sequence: Synthetic oligonucleotide
  misc_feature 1..20: note = Target: ANGPTL4; (+) strand; PAM type: NRG; PAM sequence: TGG
  source 1..20: mol_type = other DNA
gaagcctacaaggcggggtt

SEQ ID NO: 11886 - DNA, 20 bp, synthetic construct
  misc_feature 1..20: note = Description of Artificial Sequence: Synthetic oligonucleotide
  misc_feature 1..20: note = Target: ANGPTL4; (+) strand; PAM type: NRG; PAM sequence: GGG
  source 1..20: mol_type = other DNA
aagcctacaaggcggggttt

SEQ ID NO: 11887 - DNA, 20 bp, synthetic construct
  misc_feature 1..20: note = Description of Artificial Sequence: Synthetic oligonucleotide
  misc_feature 1..20: note = Target: ANGPTL4; (+) strand; PAM type: NRG; PAM sequence: GGG
  source 1..20: mol_type = other DNA
agcctacaaggcggggtttg

SEQ ID NO: 11888 - DNA, 20 bp, synthetic construct
  misc_feature 1..20: note = Description of Artificial Sequence: Synthetic oligonucleotide
  misc_feature 1..20: note = Target: ANGPTL4; (+) strand; PAM type: NRG; PAM sequence: CGG
  source 1..20: mol_type = other DNA
gcggggtttggggatcccca

SEQ ID NO: 11889 - DNA, 20 bp, synthetic construct
  misc_feature 1..20: note = Description of Artificial Sequence: Synthetic oligonucleotide
  misc_feature 1..20: note = Target: ANGPTL4; (+) strand; PAM type: NRG; PAM sequence: TAG
  source 1..20: mol_type = other DNA
gggtttggggatccccacgg

SEQ ID NO: 11890 - DNA, 20 bp, synthetic construct
  misc_feature 1..20: note = Description of Artificial Sequence: Synthetic oligonucleotide
  misc_feature 1..20: note = Target: ANGPTL4; (+) strand; PAM type: NRG; PAM sequence: AGG
  source 1..20: mol_type = other DNA
ggtttggggatccccacggt

SEQ ID NO: 11891 - DNA, 20 bp, synthetic construct
  misc_feature 1..20: note = Description of Artificial Sequence: Synthetic oligonucleotide
  misc_feature 1..20: note = Target: ANGPTL4; (+) strand; PAM type: NRG; PAM sequence: TAG
  source 1..20: mol_type = other DNA
atccccacggtaggtgtttc

SEQ ID NO: 11892 - DNA, 20 bp, synthetic construct
  misc_feature 1..20: note = Description of Artificial Sequence: Synthetic oligonucleotide
  misc_feature 1..20: note = Target: ANGPTL4; (+) strand; PAM type: NRG; PAM sequence: TGG
  source 1..20: mol_type = other DNA
cccacggtaggtgtttctag

SEQ ID NO: 11893 - DNA, 20 bp, synthetic construct
  misc_feature 1..20: note = Description of Artificial Sequence: Synthetic oligonucleotide
  misc_feature 1..20: note = Target: ANGPTL4; (+) strand; PAM type: NRG; PAM sequence: GGG
  source 1..20: mol_type = other DNA
ccacggtaggtgtttctagt

SEQ ID NO: 11894 - DNA, 20 bp, synthetic construct
  misc_feature 1..20: note = Description of Artificial Sequence: Synthetic oligonucleotide
  misc_feature 1..20: note = Target: ANGPTL4; (+) strand; PAM type: NRG; PAM sequence: GGG
  source 1..20: mol_type = other DNA
cacggtaggtgtttctagtg

SEQ ID NO: 11895 - DNA, 20 bp, synthetic construct
  misc_feature 1..20: note = Description of Artificial Sequence: Synthetic oligonucleotide
  misc_feature 1..20: note = Target: ANGPTL4; (+) strand; PAM type: NRG; PAM sequence: CAG
  source 1..20: mol_type = other DNA
gtaggtgtttctagtgggga

SEQ ID NO: 11896 - DNA, 20 bp, synthetic construct
  misc_feature 1..20: note = Description of Artificial Sequence: Synthetic oligonucleotide
  misc_feature 1..20: note = Target: ANGPTL4; (+) strand; PAM type: NRG; PAM sequence: GAG
  source 1..20: mol_type = other DNA
aggtgtttctagtggggaca

SEQ ID NO: 11897 - DNA, 20 bp, synthetic construct
  misc_feature 1..20: note = Description of Artificial Sequence: Synthetic oligonucleotide
  misc_feature 1..20: note = Target: ANGPTL4; (+) strand; PAM type: NRG; PAM sequence: AGG
  source 1..20: mol_type = other DNA
ggtgtttctagtggggacag

SEQ ID NO: 11898 - DNA, 20 bp, synthetic construct
  misc_feature 1..20: note = Description of Artificial Sequence: Synthetic oligonucleotide
  misc_feature 1..20: note = Target: ANGPTL4; (+) strand; PAM type: NRG; PAM sequence: CAG
  source 1..20: mol_type = other DNA
gtttctagtggggacagagg

SEQ ID NO: 11899 - DNA, 20 bp, synthetic construct
  misc_feature 1..20: note = Description of Artificial Sequence: Synthetic oligonucleotide
  misc_feature 1..20: note = Target: ANGPTL4; (+) strand; PAM type: NRG; PAM sequence: AGG
  source 1..20: mol_type = other DNA
tttctagtggggacagaggc

SEQ ID NO: 11900 - DNA, 20 bp, synthetic construct
  misc_feature 1..20: note = Description of Artificial Sequence: Synthetic oligonucleotide
  misc_feature 1..20: note = Target: ANGPTL4; (+) strand; PAM type: NRG; PAM sequence: GGG
  source 1..20: mol_type = other DNA
ttctagtggggacagaggca

SEQ ID NO: 11901 - DNA, 20 bp, synthetic construct
  misc_feature 1..20: note = Description of Artificial Sequence: Synthetic oligonucleotide
  misc_feature 1..20: note = Target: ANGPTL4; (+) strand; PAM type: NRG; PAM sequence: GGG
  source 1..20: mol_type = other DNA
tctagtggggacagaggcag

SEQ ID NO: 11902 - DNA, 20 bp, synthetic construct
  misc_feature 1..20: note = Description of Artificial Sequence: Synthetic oligonucleotide
  misc_feature 1..20: note = Target: ANGPTL4; (+) strand; PAM type: NRG; PAM sequence: GAG
  source 1..20: mol_type = other DNA
tagtggggacagaggcaggg

SEQ ID NO: 11903 - DNA, 20 bp, synthetic construct
  misc_feature 1..20: note = Description of Artificial Sequence: Synthetic oligonucleotide
  misc_feature 1..20: note = Target: ANGPTL4; (+) strand; PAM type: NRG; PAM sequence: AGG
  source 1..20: mol_type = other DNA
agtggggacagaggcagggg

SEQ ID NO: 11904 - DNA, 20 bp, synthetic construct
  misc_feature 1..20: note = Description of Artificial Sequence: Synthetic oligonucleotide
  misc_feature 1..20: note = Target: ANGPTL4; (+) strand; PAM type: NRG; PAM sequence: AAG
  source 1..20: mol_type = other DNA
ggggacagaggcaggggagg

SEQ ID NO: 11905 - DNA, 20 bp, synthetic construct
  misc_feature 1..20: note = Description of Artificial Sequence: Synthetic oligonucleotide
  misc_feature 1..20: note = Target: ANGPTL4; (+) strand; PAM type: NRG; PAM sequence: GAG
  source 1..20: mol_type = other DNA
ggacagaggcaggggaggaa

SEQ ID NO: 11906 - DNA, 20 bp, synthetic construct
  misc_feature 1..20: note = Description of Artificial Sequence: Synthetic oligonucleotide
  misc_feature 1..20: note = Target: ANGPTL4; (+) strand; PAM type: NRG; PAM sequence: AGG
  source 1..20: mol_type = other DNA
gacagaggcaggggaggaag

SEQ ID NO: 11907 - DNA, 20 bp, synthetic construct
  misc_feature 1..20: note = Description of Artificial Sequence: Synthetic oligonucleotide
  misc_feature 1..20: note = Target: ANGPTL4; (+) strand; PAM type: NRG; PAM sequence: GGG
  source 1..20: mol_type = other DNA
acagaggcaggggaggaaga

SEQ ID NO: 11908 - DNA, 20 bp, synthetic construct
  misc_feature 1..20: note = Description of Artificial Sequence: Synthetic oligonucleotide
  misc_feature 1..20: note = Target: ANGPTL4; (+) strand; PAM type: NRG; PAM sequence: CAG
  source 1..20: mol_type = other DNA
aggggaggaagagggaccct

SEQ ID NO: 11909 - DNA, 20 bp, synthetic construct
  misc_feature 1..20: note = Description of Artificial Sequence: Synthetic oligonucleotide
  misc_feature 1..20: note = Target: ANGPTL4; (+) strand; PAM type: NRG; PAM sequence: AAG
  source 1..20: mol_type = other DNA
ggaggaagagggaccctcag

SEQ ID NO: 11910 - DNA, 20 bp, synthetic construct
  misc_feature 1..20: note = Description of Artificial Sequence: Synthetic oligonucleotide
  misc_feature 1..20: note = Target: ANGPTL4; (+) strand; PAM type: NRG; PAM sequence: TGG
  source 1..20: mol_type = other DNA
ggaagagggaccctcagaag

SEQ ID NO: 11911 - DNA, 20 bp, synthetic construct
  misc_feature 1..20: note = Description of Artificial Sequence: Synthetic oligonucleotide
  misc_feature 1..20: note = Target: ANGPTL4; (+) strand; PAM type: NRG; PAM sequence: TGG
  source 1..20: mol_type = other DNA
tcagaagtggccctgcctca

SEQ ID NO: 11912 - DNA, 20 bp, synthetic construct
  misc_feature 1..20: note = Description of Artificial Sequence: Synthetic oligonucleotide
  misc_feature 1..20: note = Target: ANGPTL4; (+) strand; PAM type: NRG; PAM sequence: GAG
  source 1..20: mol_type = other DNA
agaagtggccctgcctcatg

SEQ ID NO: 11913 - DNA, 20 bp, synthetic construct
  misc_feature 1..20: note = Description of Artificial Sequence: Synthetic oligonucleotide
  misc_feature 1..20: note = Target: ANGPTL4; (+) strand; PAM type: NRG; PAM sequence: TGG
  source 1..20: mol_type = other DNA
agtggccctgcctcatggag

SEQ ID NO: 11914 - DNA, 20 bp, synthetic construct
  misc_feature 1..20: note = Description of Artificial Sequence: Synthetic oligonucleotide
  misc_feature 1..20: note = Target: ANGPTL4; (+) strand; PAM type: NRG; PAM sequence: CAG
  source 1..20: mol_type = other DNA
tggagtggcctctcccactc

SEQ ID NO: 11915 - DNA, 20 bp, synthetic construct
  misc_feature 1..20: note = Description of Artificial Sequence: Synthetic oligonucleotide
  misc_feature 1..20: note = Target: ANGPTL4; (+) strand; PAM type: NRG; PAM sequence: AGG
  source 1..20: mol_type = other DNA
ggagtggcctctcccactcc

SEQ ID NO: 11916 - DNA, 20 bp, synthetic construct
  misc_feature 1..20: note = Description of Artificial Sequence: Synthetic oligonucleotide
  misc_feature 1..20: note = Target: ANGPTL4; (+) strand; PAM type: NRG; PAM sequence: GAG
  source 1..20: mol_type = other DNA
tggcctctcccactccaggc

SEQ ID NO: 11917 - DNA, 20 bp, synthetic construct
  misc_feature 1..20: note = Description of Artificial Sequence: Synthetic oligonucleotide
  misc_feature 1..20: note = Target: ANGPTL4; (+) strand; PAM type: NRG; PAM sequence: TGG
  source 1..20: mol_type = other DNA
ctcccactccaggcgagttc

SEQ ID NO: 11918 - DNA, 20 bp, synthetic construct
  misc_feature 1..20: note = Description of Artificial Sequence: Synthetic oligonucleotide
  misc_feature 1..20: note = Target: ANGPTL4; (+) strand; PAM type: NRG; PAM sequence: TGG
  source 1..20: mol_type = other DNA
cactccaggcgagttctggc

SEQ ID NO: 11919 - DNA, 20 bp, synthetic construct
  misc_feature 1..20: note = Description of Artificial Sequence: Synthetic oligonucleotide
  misc_feature 1..20: note = Target: ANGPTL4; (+) strand; PAM type: NRG; PAM sequence: GGG
  source 1..20: mol_type = other DNA
actccaggcgagttctggct

SEQ ID NO: 11920 - DNA, 20 bp, synthetic construct
  misc_feature 1..20: note = Description of Artificial Sequence: Synthetic oligonucleotide
  misc_feature 1..20: note = Target: ANGPTL4; (+) strand; PAM type: NRG; PAM sequence: TGG
  source 1..20: mol_type = other DNA
aggcgagttctggctgggtc

SEQ ID NO: 11921 - DNA, 20 bp, synthetic construct
  misc_feature 1..20: note = Description of Artificial Sequence: Synthetic oligonucleotide
  misc_feature 1..20: note = Target: ANGPTL4; (+) strand; PAM type: NRG; PAM sequence: GAG
  source 1..20: mol_type = other DNA
gcgagttctggctgggtctg

SEQ ID NO: 11922 - DNA, 20 bp, synthetic construct
  misc_feature 1..20: note = Description of Artificial Sequence: Synthetic oligonucleotide
  misc_feature 1..20: note = Target: ANGPTL4; (+) strand; PAM type: NRG; PAM sequence: AAG
  source 1..20: mol_type = other DNA
agttctggctgggtctggag

SEQ ID NO: 11923 - DNA, 20 bp, synthetic construct
  misc_feature 1..20: note = Description of Artificial Sequence: Synthetic oligonucleotide
  misc_feature 1..20: note = Target: ANGPTL4; (+) strand; PAM type: NRG; PAM sequence: AGG
  source 1..20: mol_type = other DNA
gttctggctgggtctggaga

SEQ ID NO: 11924 - DNA, 20 bp, synthetic construct
  misc_feature 1..20: note = Description of Artificial Sequence: Synthetic oligonucleotide
  misc_feature 1..20: note = Target: ANGPTL4; (+) strand; PAM type: NRG; PAM sequence: TAG
  source 1..20: mol_type = other DNA
ctgggtctggagaaggtgca

SEQ ID NO: 11925 - DNA, 20 bp, synthetic construct
  misc_feature 1..20: note = Description of Artificial Sequence: Synthetic oligonucleotide
  misc_feature 1..20: note = Target: ANGPTL4; (+) strand; PAM type: NRG; PAM sequence: CGG
  source 1..20: mol_type = other DNA
ggagaaggtgcatagcatca

SEQ ID NO: 11926 - DNA, 20 bp, synthetic construct
  misc_feature 1..20: note = Description of Artificial Sequence: Synthetic oligonucleotide
  misc_feature 1..20: note = Target: ANGPTL4; (+) strand; PAM type: NRG; PAM sequence: GGG
  source 1..20: mol_type = other DNA
gagaaggtgcatagcatcac

SEQ ID NO: 11927 - DNA, 20 bp, synthetic construct
  misc_feature 1..20: note = Description of Artificial Sequence: Synthetic oligonucleotide
  misc_feature 1..20: note = Target: ANGPTL4; (+) strand; PAM type: NRG; PAM sequence: GGG
  source 1..20: mol_type = other DNA
agaaggtgcatagcatcacg

SEQ ID NO: 11928 - DNA, 20 bp, synthetic construct
  misc_feature 1..20: note = Description of Artificial Sequence: Synthetic oligonucleotide
  misc_feature 1..20: note = Target: ANGPTL4; (+) strand; PAM type: NRG; PAM sequence: GGG
  source 1..20: mol_type = other DNA
gaaggtgcatagcatcacgg

SEQ ID NO: 11929 - DNA, 20 bp, synthetic construct
  misc_feature 1..20: note = Description of Artificial Sequence: Synthetic oligonucleotide
  misc_feature 1..20: note = Target: ANGPTL4; (+) strand; PAM type: NRG; PAM sequence: CAG
  source 1..20: mol_type = other DNA
agcatcacgggggaccgcaa

SEQ ID NO: 11930 - DNA, 20 bp, synthetic construct
  misc_feature 1..20: note = Description of Artificial Sequence: Synthetic oligonucleotide
  misc_feature 1..20: note = Target: ANGPTL4; (+) strand; PAM type: NRG; PAM sequence: TGG
  source 1..20: mol_type = other DNA
gggggaccgcaacagccgcc

SEQ ID NO: 11931 - DNA, 20 bp, synthetic construct
  misc_feature 1..20: note = Description of Artificial Sequence: Synthetic oligonucleotide
  misc_feature 1..20: note = Target: ANGPTL4; (+) strand; PAM type: NRG; PAM sequence: CAG
  source 1..20: mol_type = other DNA
gcaacagccgcctggccgtg

SEQ ID NO: 11932 - DNA, 20 bp, synthetic construct
  misc_feature 1..20: note = Description of Artificial Sequence: Synthetic oligonucleotide
  misc_feature 1..20: note = Target: ANGPTL4; (+) strand; PAM type: NRG; PAM sequence: CGG
  source 1..20: mol_type = other DNA
gccgcctggccgtgcagctg

SEQ ID NO: 11933 - DNA, 20 bp, synthetic construct
  misc_feature 1..20: note = Description of Artificial Sequence: Synthetic oligonucleotide
  misc_feature 1..20: note = Target: ANGPTL4; (+) strand; PAM type: NRG; PAM sequence: GGG
  source 1..20: mol_type = other DNA
ccgcctggccgtgcagctgc

SEQ ID NO: 11934 - DNA, 20 bp, synthetic construct
  misc_feature 1..20: note = Description of Artificial Sequence: Synthetic oligonucleotide
  misc_feature 1..20: note = Target: ANGPTL4; (+) strand; PAM type: NRG; PAM sequence: TGG
  source 1..20: mol_type = other DNA
tggccgtgcagctgcgggac

SEQ ID NO: 11935 - DNA, 20 bp, synthetic construct
  misc_feature 1..20: note = Description of Artificial Sequence: Synthetic oligonucleotide
  misc_feature 1..20: note = Target: ANGPTL4; (+) strand; PAM type: NRG; PAM sequence: GGG
  source 1..20: mol_type = other DNA
ggccgtgcagctgcgggact

SEQ ID NO: 11936 - DNA, 20 bp, synthetic construct
  misc_feature 1..20: note = Description of Artificial Sequence: Synthetic oligonucleotide
  misc_feature 1..20: note = Target: ANGPTL4; (+) strand; PAM type: NRG; PAM sequence: TGG
  source 1..20: mol_type = other DNA
gtgcagctgcgggactggga

SEQ ID NO: 11937 - DNA, 20 bp, synthetic construct
  misc_feature 1..20: note = Description of Artificial Sequence: Synthetic oligonucleotide
  misc_feature 1..20: note = Target: ANGPTL4; (+) strand; PAM type: NRG; PAM sequence: GAG
  source 1..20: mol_type = other DNA
gggactgggatggcaacgcc

SEQ ID NO: 11938 - DNA, 20 bp, synthetic construct
  misc_feature 1..20: note = Description of Artificial Sequence: Synthetic oligonucleotide
  misc_feature 1..20: note = Target: ANGPTL4; (+) strand; PAM type: NRG; PAM sequence: CAG
  source 1..20: mol_type = other DNA
atggcaacgccgagttgctg

SEQ ID NO: 11939 - DNA, 20 bp, synthetic construct
  misc_feature 1..20: note = Description of Artificial Sequence: Synthetic oligonucleotide
  misc_feature 1..20: note = Target: ANGPTL4; (+) strand; PAM type: NRG; PAM sequence: TGG
  source 1..20: mol_type = other DNA
gctgcagttctccgtgcacc

SEQ ID NO: 11940 - DNA, 20 bp, synthetic construct
  misc_feature 1..20: note = Description of Artificial Sequence: Synthetic oligonucleotide
  misc_feature 1..20: note = Target: ANGPTL4; (+) strand; PAM type: NRG; PAM sequence: GGG
  source 1..20: mol_type = other DNA
ctgcagttctccgtgcacct

SEQ ID NO: 11941 - DNA, 20 bp, synthetic construct
  misc_feature 1..20: note = Description of Artificial Sequence: Synthetic oligonucleotide
  misc_feature 1..20: note = Target: ANGPTL4; (+) strand; PAM type: NRG; PAM sequence: TGG
  source 1..20: mol_type = other DNA
cagttctccgtgcacctggg

SEQ ID NO: 11942 - DNA, 20 bp, synthetic construct
  misc_feature 1..20: note = Description of Artificial Sequence: Synthetic oligonucleotide
  misc_feature 1..20: note = Target: ANGPTL4; (+) strand; PAM type: NRG; PAM sequence: GAG
  source 1..20: mol_type = other DNA
tctccgtgcacctgggtggc

SEQ ID NO: 11943 - DNA, 20 bp, synthetic construct
  misc_feature 1..20: note = Description of Artificial Sequence: Synthetic oligonucleotide
  misc_feature 1..20: note = Target: ANGPTL4; (+) strand; PAM type: NRG; PAM sequence: AGG
  source 1..20: mol_type = other DNA
ctccgtgcacctgggtggcg

SEQ ID NO: 11944 - DNA, 20 bp, synthetic construct
  misc_feature 1..20: note = Description of Artificial Sequence: Synthetic oligonucleotide
  misc_feature 1..20: note = Target: ANGPTL4; (+) strand; PAM type: NRG; PAM sequence: CGG
  source 1..20: mol_type = other DNA
gcacctgggtggcgaggaca

SEQ ID NO: 11945 - DNA, 20 bp, synthetic construct
  misc_feature 1..20: note = Description of Artificial Sequence: Synthetic oligonucleotide
  misc_feature 1..20: note = Target: ANGPTL4; (+) strand; PAM type: NRG; PAM sequence: TAG
  source 1..20: mol_type = other DNA
ggtggcgaggacacggccta

SEQ ID NO: 11946 - DNA, 20 bp, synthetic construct
  misc_feature 1..20: note = Description of Artificial Sequence: Synthetic oligonucleotide
  misc_feature 1..20: note = Target: ANGPTL4; (+) strand; PAM type: NRG; PAM sequence: CAG
  source 1..20: mol_type = other DNA
aggacacggcctatagcctg

SEQ ID NO: 11947 - DNA, 20 bp, synthetic construct
  misc_feature 1..20: note = Description of Artificial Sequence: Synthetic oligonucleotide
  misc_feature 1..20: note = Target: ANGPTL4; (+) strand; PAM type: NRG; PAM sequence: TGG
  source 1..20: mol_type = other DNA
cctgcagctcactgcacccg

SEQ ID NO: 11948 - DNA, 20 bp, synthetic construct
  misc_feature 1..20: note = Description of Artificial Sequence: Synthetic oligonucleotide
  misc_feature 1..20: note = Target: ANGPTL4; (+) strand; PAM type: NRG; PAM sequence: CGG
  source 1..20: mol_type = other DNA
cagctcactgcacccgtggc

SEQ ID NO: 11949 - DNA, 20 bp, synthetic construct
  misc_feature 1..20: note = Description of Artificial Sequence: Synthetic oligonucleotide
  misc_feature 1..20: note = Target: ANGPTL4; (+) strand; PAM type: NRG; PAM sequence: CAG
  source 1..20: mol_type = other DNA
tcactgcacccgtggccggc

SEQ ID NO: 11950 - DNA, 20 bp, synthetic construct
  misc_feature 1..20: note = Description of Artificial Sequence: Synthetic oligonucleotide
  misc_feature 1..20: note = Target: ANGPTL4; (+) strand; PAM type: NRG; PAM sequence: TGG
  source 1..20: mol_type = other DNA
tgcacccgtggccggccagc

SEQ ID NO: 11951 - DNA, 20 bp, synthetic construct
  misc_feature 1..20: note = Description of Artificial Sequence: Synthetic oligonucleotide
  misc_feature 1..20: note = Target: ANGPTL4; (+) strand; PAM type: NRG; PAM sequence: GGG
  source 1..20: mol_type = other DNA
gcacccgtggccggccagct

SEQ ID NO: 11952 - DNA, 20 bp, synthetic construct
  misc_feature 1..20: note = Description of Artificial Sequence: Synthetic oligonucleotide
  misc_feature 1..20: note = Target: ANGPTL4; (+) strand; PAM type: NRG; PAM sequence: CAG
  source 1..20: mol_type = other DNA
ggcgccaccaccgtcccacc

SEQ ID NO: 11953 - DNA, 20 bp, synthetic construct
  misc_feature 1..20: note = Description of Artificial Sequence: Synthetic oligonucleotide
  misc_feature 1..20: note = Target: ANGPTL4; (+) strand; PAM type: NRG; PAM sequence: CGG
  source 1..20: mol_type = other DNA
gccaccaccgtcccacccag

SEQ ID NO: 11954 - DNA, 20 bp, synthetic construct
  misc_feature 1..20: note = Description of Artificial Sequence: Synthetic oligonucleotide
  misc_feature 1..20: note = Target: ANGPTL4; (+) strand; PAM type: NRG; PAM sequence: TGG
  source 1..20: mol_type = other DNA
tctccgtacccttctccact

SEQ ID NO: 11955 - DNA, 20 bp, synthetic construct
  misc_feature 1..20: note = Description of Artificial Sequence: Synthetic oligonucleotide
  misc_feature 1..20: note = Target: ANGPTL4; (+) strand; PAM type: NRG; PAM sequence: GGG
  source 1..20: mol_type = other DNA
ctccgtacccttctccactt

SEQ ID NO: 11956 - DNA, 20 bp, synthetic construct
  misc_feature 1..20: note = Description of Artificial Sequence: Synthetic oligonucleotide
  misc_feature 1..20: note = Target: ANGPTL4; (+) strand; PAM type: NRG; PAM sequence: CAG
  source 1..20: mol_type = other DNA
tacccttctccacttgggac

SEQ ID NO: 11957 - DNA, 20 bp, synthetic construct
  misc_feature 1..20: note = Description of Artificial Sequence: Synthetic oligonucleotide
  misc_feature 1..20: note = Target: ANGPTL4; (+) strand; PAM type: NRG; PAM sequence: AGG
  source 1..20: mol_type = other DNA
acccttctccacttgggacc

SEQ ID NO: 11958 - DNA, 20 bp, synthetic construct
  misc_feature 1..20: note = Description of Artificial Sequence: Synthetic oligonucleotide
  misc_feature 1..20: note = Target: ANGPTL4; (+) strand; PAM type: NRG; PAM sequence: CAG
  source 1..20: mol_type = other DNA
gaccaggatcacgacctccg

SEQ ID NO: 11959 - DNA, 20 bp, synthetic construct
  misc_feature 1..20: note = Description of Artificial Sequence: Synthetic oligonucleotide
  misc_feature 1..20: note = Target: ANGPTL4; (+) strand; PAM type: NRG; PAM sequence: AGG
  source 1..20: mol_type = other DNA
accaggatcacgacctccgc

SEQ ID NO: 11960 - DNA, 20 bp, synthetic construct
  misc_feature 1..20: note = Description of Artificial Sequence: Synthetic oligonucleotide
  misc_feature 1..20: note = Target: ANGPTL4; (+) strand; PAM type: NRG; PAM sequence: GGG
  source 1..20: mol_type = other DNA
ccaggatcacgacctccgca

SEQ ID NO: 11961 - DNA, 20 bp, synthetic construct
  misc_feature 1..20: note = Description of Artificial Sequence: Synthetic oligonucleotide
  misc_feature 1..20: note = Target: ANGPTL4; (+) strand; PAM type: NRG; PAM sequence: AAG
  source 1..20: mol_type = other DNA
atcacgacctccgcagggac

SEQ ID NO: 11962 - DNA, 20 bp, synthetic construct
  misc_feature 1..20: note = Description of Artificial Sequence: Synthetic oligonucleotide
  misc_feature 1..20: note = Target: ANGPTL4; (+) strand; PAM type: NRG; PAM sequence: AAG
  source 1..20: mol_type = other DNA
gcagggacaagaactgcgcc

SEQ ID NO: 11963 - DNA, 20 bp, synthetic construct
  misc_feature 1..20: note = Description of Artificial Sequence: Synthetic oligonucleotide
  misc_feature 1..20: note = Target: ANGPTL4; (+) strand; PAM type: NRG; PAM sequence: GAG
  source 1..20: mol_type = other DNA
agggacaagaactgcgccaa

SEQ ID NO: 11964 - DNA, 20 bp, synthetic construct
  misc_feature 1..20: note = Description of Artificial Sequence: Synthetic oligonucleotide
  misc_feature 1..20: note = Target: ANGPTL4; (+) strand; PAM type: NRG; PAM sequence: TGG
  source 1..20: mol_type = other DNA
aactgcgccaagagcctctc

SEQ ID NO: 11965 - DNA, 20 bp, synthetic construct
  misc_feature 1..20: note = Description of Artificial Sequence: Synthetic oligonucleotide
  misc_feature 1..20: note = Target: ANGPTL4; (+) strand; PAM type: NRG; PAM sequence: GAG
  source 1..20: mol_type = other DNA
gcgccaagagcctctctggt

SEQ ID NO: 11966 - DNA, 20 bp, synthetic construct
  misc_feature 1..20: note = Description of Artificial Sequence: Synthetic oligonucleotide
  misc_feature 1..20: note = Target: ANGPTL4; (+) strand; PAM type: NRG; PAM sequence: CAG
  source 1..20: mol_type = other DNA
ccaagagcctctctggtgag

SEQ ID NO: 11967 - DNA, 20 bp, synthetic construct
  misc_feature 1..20: note = Description of Artificial Sequence: Synthetic oligonucleotide
  misc_feature 1..20: note = Target: ANGPTL4; (+) strand; PAM type: NRG; PAM sequence: AGG
  source 1..20: mol_type = other DNA
caagagcctctctggtgagc

SEQ ID NO: 11968 - DNA, 20 bp, synthetic construct
  misc_feature 1..20: note = Description of Artificial Sequence: Synthetic oligonucleotide
  misc_feature 1..20: note = Target: ANGPTL4; (+) strand; PAM type: NRG; PAM sequence: CAG
  source 1..20: mol_type = other DNA
aggccctgccatgccacacc

SEQ ID NO: 11969 - DNA, 20 bp, synthetic construct
  misc_feature 1..20: note = Description of Artificial Sequence: Synthetic oligonucleotide
  misc_feature 1..20: note = Target: ANGPTL4; (+) strand; PAM type: NRG; PAM sequence: CAG
  source 1..20: mol_type = other DNA
cctgccatgccacacccagc

SEQ ID NO: 11970 - DNA, 20 bp, synthetic construct
  misc_feature 1..20: note = Description of Artificial Sequence: Synthetic oligonucleotide
  misc_feature 1..20: note = Target: ANGPTL4; (+) strand; PAM type: NRG; PAM sequence: CAG
  source 1..20: mol_type = other DNA
gccatgccacacccagccag

SEQ ID NO: 11971 - DNA, 20 bp, synthetic construct
  misc_feature 1..20: note = Description of Artificial Sequence: Synthetic oligonucleotide
  misc_feature 1..20: note = Target: ANGPTL4; (+) strand; PAM type: NRG; PAM sequence: TGG
  source 1..20: mol_type = other DNA
ttacatgccgtgtgtgtgat

SEQ ID NO: 11972 - DNA, 20 bp, synthetic construct
  misc_feature 1..20: note = Description of Artificial Sequence: Synthetic oligonucleotide
  misc_feature 1..20: note = Target: ANGPTL4; (+) strand; PAM type: NRG; PAM sequence: GGG
  source 1..20: mol_type = other DNA
tacatgccgtgtgtgtgatt

SEQ ID NO: 11973 - DNA, 20 bp, synthetic construct
  misc_feature 1..20: note = Description of Artificial Sequence: Synthetic oligonucleotide
  misc_feature 1..20: note = Target: ANGPTL4; (+) strand; PAM type: NRG; PAM sequence: TAG
  source 1..20: mol_type = other DNA
gtgtgattgggccactaact

SEQ ID NO: 11974 - DNA, 20 bp, synthetic construct
  misc_feature 1..20: note = Description of Artificial Sequence: Synthetic oligonucleotide
  misc_feature 1..20: note = Target: ANGPTL4; (+) strand; PAM type: NRG; PAM sequence: TGG
  source 1..20: mol_type = other DNA
ggccactaacttagcctatc

SEQ ID NO: 11975 - DNA, 20 bp, synthetic construct
  misc_feature 1..20: note = Description of Artificial Sequence: Synthetic oligonucleotide
  misc_feature 1..20: note = Target: ANGPTL4; (+) strand; PAM type: NRG; PAM sequence: CAG
  source 1..20: mol_type = other DNA
taacttagcctatctggcct

SEQ ID NO: 11976 - DNA, 20 bp, synthetic construct
  misc_feature 1..20: note = Description of Artificial Sequence: Synthetic oligonucleotide
  misc_feature 1..20: note = Target: ANGPTL4; (+) strand; PAM type: NRG; PAM sequence: AAG
  source 1..20: mol_type = other DNA
ctcagttttcccatcctgaa

SEQ ID NO: 11977 - DNA, 20 bp, synthetic construct
  misc_feature 1..20: note = Description of Artificial Sequence: Synthetic oligonucleotide
  misc_feature 1..20: note = Target: ANGPTL4; (+) strand; PAM type: NRG; PAM sequence: AGG
  source 1..20: mol_type = other DNA
tcagttttcccatcctgaaa

SEQ ID NO: 11978 - DNA, 20 bp, synthetic construct
  misc_feature 1..20: note = Description of Artificial Sequence: Synthetic oligonucleotide
  misc_feature 1..20: note = Target: ANGPTL4; (+) strand; PAM type: NRG; PAM sequence: GGG
  source 1..20: mol_type = other DNA
cagttttcccatcctgaaaa

SEQ ID NO: 11979 - DNA, 20 bp, synthetic construct
  misc_feature 1..20: note = Description of Artificial Sequence: Synthetic oligonucleotide
  misc_feature 1..20: note = Target: ANGPTL4; (+) strand; PAM type: NRG; PAM sequence: GAG
  source 1..20: mol_type = other DNA
tatttatgtatttatttttt

SEQ ID NO: 11980 - DNA, 20 bp, synthetic construct
  misc_feature 1..20: note = Description of Artificial Sequence: Synthetic oligonucleotide
  misc_feature 1..20: note = Target: ANGPTL4; (+) strand; PAM type: NRG; PAM sequence: CGG
  source 1..20: mol_type = other DNA
tatgtatttattttttgaga

SEQ ID NO: 11981 - DNA, 20 bp, synthetic construct
  misc_feature 1..20: note = Description of Artificial Sequence: Synthetic oligonucleotide
  misc_feature 1..20: note = Target: ANGPTL4; (+) strand; PAM type: NRG; PAM sequence: GAG
  source 1..20: mol_type = other DNA
tgtatttattttttgagacg

SEQ ID NO: 11982 - DNA, 20 bp, synthetic construct
  misc_feature 1..20: note = Description of Artificial Sequence: Synthetic oligonucleotide
  misc_feature 1..20: note = Target: ANGPTL4; (+) strand; PAM type: NRG; PAM sequence: CAG
  source 1..20: mol_type = other DNA
cggagtctcactttgtcacc

SEQ ID NO: 11983 - DNA, 20 bp, synthetic construct
  misc_feature 1..20: note = Description of Artificial Sequence: Synthetic oligonucleotide
  misc_feature 1..20: note = Target: ANGPTL4; (+) strand; PAM type: NRG; PAM sequence: AGG
  source 1..20: mol_type = other DNA
ggagtctcactttgtcaccc

SEQ ID NO: 11984 - DNA, 20 bp, synthetic construct
  misc_feature 1..20: note = Description of Artificial Sequence: Synthetic oligonucleotide
  misc_feature 1..20: note = Target: ANGPTL4; (+) strand; PAM type: NRG; PAM sequence: TGG
  source 1..20: mol_type = other DNA
tctcactttgtcacccaggc

SEQ ID NO: 11985 - DNA, 20 bp, synthetic construct
  misc_feature 1..20: note = Description of Artificial Sequence: Synthetic oligonucleotide
  misc_feature 1..20: note = Target: ANGPTL4; (+) strand; PAM type: NRG; PAM sequence: GAG
  source 1..20: mol_type = other DNA
tcactttgtcacccaggctg

SEQ ID NO: 11986 - DNA, 20 bp, synthetic construct
  misc_feature 1..20: note = Description of Artificial Sequence: Synthetic oligonucleotide
  misc_feature 1..20: note = Target: ANGPTL4; (+) strand; PAM type: NRG; PAM sequence: TGG
  source 1..20: mol_type = other DNA
acccaggctggagtgctttg

SEQ ID NO: 11987 - DNA, 20 bp, synthetic construct
  misc_feature 1..20: note = Description of Artificial Sequence: Synthetic oligonucleotide
  misc_feature 1..20: note = Target: ANGPTL4; (+) strand; PAM type: NRG; PAM sequence: TGG
  source 1..20: mol_type = other DNA
agtgctttgtggcacgatct

SEQ ID NO: 11988 - DNA, 20 bp, synthetic construct
  misc_feature 1..20: note = Description of Artificial Sequence: Synthetic oligonucleotide
  misc_feature 1..20: note = Target: ANGPTL4; (+) strand; PAM type: NRG; PAM sequence: AAG
  source 1..20: mol_type = other DNA
gcacgatcttggctcactgc

SEQ ID NO: 11989 - DNA, 20 bp, synthetic construct
  misc_feature 1..20: note = Description of Artificial Sequence: Synthetic oligonucleotide
  misc_feature 1..20: note = Target: ANGPTL4; (+) strand; PAM type: NRG; PAM sequence: GAG
  source 1..20: mol_type = other DNA
cactgcaagctccacctcct

SEQ ID NO: 11990 - DNA, 20 bp, synthetic construct
  misc_feature 1..20: note = Description of Artificial Sequence: Synthetic oligonucleotide
  misc_feature 1..20: note = Target: ANGPTL4; (+) strand; PAM type: NRG; PAM sequence: CAG
  source 1..20: mol_type = other DNA
ttcacaccattctcctgcct

SEQ ID NO: 11991 - DNA, 20 bp, synthetic construct
  misc_feature 1..20: note = Description of Artificial Sequence: Synthetic oligonucleotide
  misc_feature 1..20: note = Target: ANGPTL4; (+) strand; PAM type: NRG; PAM sequence: GAG
  source 1..20: mol_type = other DNA
ttctcctgcctcagcctccc

SEQ ID NO: 11992 - DNA, 20 bp, synthetic construct
  misc_feature 1..20: note = Description of Artificial Sequence: Synthetic oligonucleotide
  misc_feature 1..20: note = Target: ANGPTL4; (+) strand; PAM type: NRG; PAM sequence: TAG
  source 1..20: mol_type = other DNA
tcctgcctcagcctcccgag

SEQ ID NO: 11993 - DNA, 20 bp, synthetic construct
  misc_feature 1..20: note = Description of Artificial Sequence: Synthetic oligonucleotide
  misc_feature 1..20: note = Target: ANGPTL4; (+) strand; PAM type: NRG; PAM sequence: TGG
  source 1..20: mol_type = other DNA
gcctcagcctcccgagtagc

SEQ ID NO: 11994 - DNA, 20 bp, synthetic construct
  misc_feature 1..20: note = Description of Artificial Sequence: Synthetic oligonucleotide
  misc_feature 1..20: note = Target: ANGPTL4; (+) strand; PAM type: NRG; PAM sequence: GGG
  source 1..20: mol_type = other DNA
cctcagcctcccgagtagct

SEQ ID NO: 11995 - DNA, 20 bp, synthetic construct
  misc_feature 1..20: note = Description of Artificial Sequence: Synthetic oligonucleotide
  misc_feature 1..20: note = Target: ANGPTL4; (+) strand; PAM type: NRG; PAM sequence: TAG
  source 1..20: mol_type = other DNA
ctcccgagtagctgggacta

SEQ ID NO: 11996 - DNA, 20 bp, synthetic construct
  misc_feature 1..20: note = Description of Artificial Sequence: Synthetic oligonucleotide
  misc_feature 1..20: note = Target: ANGPTL4; (+) strand; PAM type: NRG; PAM sequence: AGG
  source 1..20: mol_type = other DNA
tcccgagtagctgggactat

SEQ ID NO: 11997 - DNA, 20 bp, synthetic construct
  misc_feature 1..20: note = Description of Artificial Sequence: Synthetic oligonucleotide
  misc_feature 1..20: note = Target: ANGPTL4; (+) strand; PAM type: NRG; PAM sequence: TGG
  source 1..20: mol_type = other DNA
taggtgcccaccaccacgcc

SEQ ID NO: 11998 - DNA, 20 bp, synthetic construct
  misc_feature 1..20: note = Description of Artificial Sequence: Synthetic oligonucleotide
  misc_feature 1..20: note = Target: ANGPTL4; (+) strand; PAM type: NRG; PAM sequence: TAG
  source 1..20: mol_type = other DNA
ggctaatttttttgtatttt

SEQ ID NO: 11999 - DNA, 20 bp, synthetic construct
  misc_feature 1..20: note = Description of Artificial Sequence: Synthetic oligonucleotide
  misc_feature 1..20: note = Target: ANGPTL4; (+) strand; PAM type: NRG; PAM sequence: TAG
  source 1..20: mol_type = other DNA
taatttttttgtatttttag

SEQ ID NO: 12000 - DNA, 20 bp, synthetic construct
  misc_feature 1..20: note = Description of Artificial Sequence: Synthetic oligonucleotide
  misc_feature 1..20: note = Target: ANGPTL4; (+) strand; PAM type: NRG; PAM sequence: GAG
  source 1..20: mol_type = other DNA
atttttttgtatttttagta

SEQ ID NO: 12001 - DNA, 20 bp, synthetic construct
  misc_feature 1..20: note = Description of Artificial Sequence: Synthetic oligonucleotide
  misc_feature 1..20: note = Target: ANGPTL4; (+) strand; PAM type: NRG; PAM sequence: TGG
  source 1..20: mol_type = other DNA
ttttgtatttttagtagaga

SEQ ID NO: 12002 - DNA, 20 bp, synthetic construct
  misc_feature 1..20: note = Description of Artificial Sequence: Synthetic oligonucleotide
  misc_feature 1..20: note = Target: ANGPTL4; (+) strand; PAM type: NRG; PAM sequence: GGG
  source 1..20: mol_type = other DNA
tttgtatttttagtagagat

SEQ ID NO: 12003 - DNA, 20 bp, synthetic construct
  misc_feature 1..20: note = Description of Artificial Sequence: Synthetic oligonucleotide
  misc_feature 1..20: note = Target: ANGPTL4; (+) strand; PAM type: NRG; PAM sequence: GGG
  source 1..20: mol_type = other DNA
ttgtatttttagtagagatg

SEQ ID NO: 12004 - DNA, 20 bp, synthetic construct
  misc_feature 1..20: note = Description of Artificial Sequence: Synthetic oligonucleotide
  misc_feature 1..20: note = Target: ANGPTL4; (+) strand; PAM type: NRG; PAM sequence: TAG
  source 1..20: mol_type = other DNA
gagatggggtttcaccgtgt

SEQ ID NO: 12005 - DNA, 20 bp, synthetic construct
  misc_feature 1..20: note = Description of Artificial Sequence: Synthetic oligonucleotide
  misc_feature 1..20: note = Target: ANGPTL4; (+) strand; PAM type: NRG; PAM sequence: CAG
  source 1..20: mol_type = other DNA
tggggtttcaccgtgttagc

SEQ ID NO: 12006 - DNA, 20 bp, synthetic construct
  misc_feature 1..20: note = Description of Artificial Sequence: Synthetic oligonucleotide
  misc_feature 1..20: note = Target: ANGPTL4; (+) strand; PAM type: NRG; PAM sequence: AGG
  source 1..20: mol_type = other DNA
ggggtttcaccgtgttagcc

SEQ ID NO: 12007 - DNA, 20 bp, synthetic construct
  misc_feature 1..20: note = Description of Artificial Sequence: Synthetic oligonucleotide
  misc_feature 1..20: note = Target: ANGPTL4; (+) strand; PAM type: NRG; PAM sequence: TGG
  source 1..20: mol_type = other DNA
tttcaccgtgttagccagga

SEQ ID NO: 12008 - DNA, 20 bp, synthetic construct
  misc_feature 1..20: note = Description of Artificial Sequence: Synthetic oligonucleotide
  misc_feature 1..20: note = Target: ANGPTL4; (+) strand; PAM type: NRG; PAM sequence: CAG
  source 1..20: mol_type = other DNA
acctcgtgatctgcctgcct

SEQ ID NO: 12009 - DNA, 20 bp, synthetic construct
  misc_feature 1..20: note = Description of Artificial Sequence: Synthetic oligonucleotide
  misc_feature 1..20: note = Target: ANGPTL4; (+) strand; PAM type: NRG; PAM sequence: AAG
  source 1..20: mol_type = other DNA
ctgcctgcctcagcctccca

SEQ ID NO: 12010 - DNA, 20 bp, synthetic construct
  misc_feature 1..20: note = Description of Artificial Sequence: Synthetic oligonucleotide
  misc_feature 1..20: note = Target: ANGPTL4; (+) strand; PAM type: NRG; PAM sequence: TGG
  source 1..20: mol_type = other DNA
gcctcagcctcccaaagtgc

SEQ ID NO: 12011 - DNA, 20 bp, synthetic construct
  misc_feature 1..20: note = Description of Artificial Sequence: Synthetic oligonucleotide
  misc_feature 1..20: note = Target: ANGPTL4; (+) strand; PAM type: NRG; PAM sequence: GGG
  source 1..20: mol_type = other DNA
cctcagcctcccaaagtgct

SEQ ID NO: 12012 - DNA, 20 bp, synthetic construct
  misc_feature 1..20: note = Description of Artificial Sequence: Synthetic oligonucleotide
  misc_feature 1..20: note = Target: ANGPTL4; (+) strand; PAM type: NRG; PAM sequence: CAG
  source 1..20: mol_type = other DNA
ctcccaaagtgctgggatta

SEQ ID NO: 12013 - DNA, 20 bp, synthetic construct
  misc_feature 1..20: note = Description of Artificial Sequence: Synthetic oligonucleotide
  misc_feature 1..20: note = Target: ANGPTL4; (+) strand; PAM type: NRG; PAM sequence: AGG
  source 1..20: mol_type = other DNA
tcccaaagtgctgggattac

SEQ ID NO: 12014 - DNA, 20 bp, synthetic construct
  misc_feature 1..20: note = Description of Artificial Sequence: Synthetic oligonucleotide
  misc_feature 1..20: note = Target: ANGPTL4; (+) strand; PAM type: NRG; PAM sequence: GAG
  source 1..20: mol_type = other DNA
agtgctgggattacaggcgt

SEQ ID NO: 12015 - DNA, 20 bp, synthetic construct
  misc_feature 1..20: note = Description of Artificial Sequence: Synthetic oligonucleotide
  misc_feature 1..20: note = Target: ANGPTL4; (+) strand; PAM type: NRG; PAM sequence: CGG
  source 1..20: mol_type = other DNA
caggcgtgagccaccgcgcc

SEQ ID NO: 12016 - DNA, 20 bp, synthetic construct
  misc_feature 1..20: note = Description of Artificial Sequence: Synthetic oligonucleotide
  misc_feature 1..20: note = Target: ANGPTL4; (+) strand; PAM type: NRG; PAM sequence: GAG
  source 1..20: mol_type = other DNA
ggcctacttatttatttttt

SEQ ID NO: 12017 - DNA, 20 bp, synthetic construct
  misc_feature 1..20: note = Description of Artificial Sequence: Synthetic oligonucleotide
  misc_feature 1..20: note = Target: ANGPTL4; (+) strand; PAM type: NRG; PAM sequence: CAG
  source 1..20: mol_type = other DNA
tacttatttattttttgaga

SEQ ID NO: 12018 - DNA, 20 bp, synthetic construct
  misc_feature 1..20: note = Description of Artificial Sequence: Synthetic oligonucleotide
  misc_feature 1..20: note = Target: ANGPTL4; (+) strand; PAM type: NRG; PAM sequence: GAG
  source 1..20: mol_type = other DNA
cttatttattttttgagaca

SEQ ID NO: 12019 - DNA, 20 bp, synthetic construct
  misc_feature 1..20: note = Description of Artificial Sequence: Synthetic oligonucleotide
  misc_feature 1..20: note = Target: ANGPTL4; (+) strand; PAM type: NRG; PAM sequence: CAG
  source 1..20: mol_type = other DNA
cagagtcccgctgtgtctcc

SEQ ID NO: 12020 - DNA, 20 bp, synthetic construct
  misc_feature 1..20: note = Description of Artificial Sequence: Synthetic oligonucleotide
  misc_feature 1..20: note = Target: ANGPTL4; (+) strand; PAM type: NRG; PAM sequence: AGG
  source 1..20: mol_type = other DNA
agagtcccgctgtgtctccc

SEQ ID NO: 12021 - DNA, 20 bp, synthetic construct
  misc_feature 1..20: note = Description of Artificial Sequence: Synthetic oligonucleotide
  misc_feature 1..20: note = Target: ANGPTL4; (+) strand; PAM type: NRG; PAM sequence: TGG
  source 1..20: mol_type = other DNA
tcccgctgtgtctcccaggc

SEQ ID NO: 12022 - DNA, 20 bp, synthetic construct
  misc_feature 1..20: note = Description of Artificial Sequence: Synthetic oligonucleotide
  misc_feature 1..20: note = Target: ANGPTL4; (+) strand; PAM type: NRG; PAM sequence: GAG
  source 1..20: mol_type = other DNA
ccgctgtgtctcccaggctg

SEQ ID NO: 12023 - DNA, 20 bp, synthetic construct
  misc_feature 1..20: note = Description of Artificial Sequence: Synthetic oligonucleotide
  misc_feature 1..20: note = Target: ANGPTL4; (+) strand; PAM type: NRG; PAM sequence: AAG
  source 1..20: mol_type = other DNA
tgtctcccaggctggagtgc

SEQ ID NO: 12024 - DNA, 20 bp, synthetic construct
  misc_feature 1..20: note = Description of Artificial Sequence: Synthetic oligonucleotide
  misc_feature 1..20: note = Target: ANGPTL4; (+) strand; PAM type: NRG; PAM sequence: TGG
  source 1..20: mol_type = other DNA
gagtgcaagtgacgtgatct

SEQ ID NO: 12025 - DNA, 20 bp, synthetic construct
  misc_feature 1..20: note = Description of Artificial Sequence: Synthetic oligonucleotide
  misc_feature 1..20: note = Target: ANGPTL4; (+) strand; PAM type: NRG; PAM sequence: CAG
  source 1..20: mol_type = other DNA
gacgtgatcttggctcactg

SEQ ID NO: 12026 - DNA, 20 bp, synthetic construct
  misc_feature 1..20: note = Description of Artificial Sequence: Synthetic oligonucleotide
  misc_feature 1..20: note = Target: ANGPTL4; (+) strand; PAM type: NRG; PAM sequence: TGG
  source 1..20: mol_type = other DNA
tcactgcagcctccgcctcc

SEQ ID NO: 12027 - DNA, 20 bp, synthetic construct
  misc_feature 1..20: note = Description of Artificial Sequence: Synthetic oligonucleotide
  misc_feature 1..20: note = Target: ANGPTL4; (+) strand; PAM type: NRG; PAM sequence: GGG
  source 1..20: mol_type = other DNA
cactgcagcctccgcctcct

SEQ ID NO: 12028 - DNA, 20 bp, synthetic construct
  misc_feature 1..20: note = Description of Artificial Sequence: Synthetic oligonucleotide
  misc_feature 1..20: note = Target: ANGPTL4; (+) strand; PAM type: NRG; PAM sequence: AAG
  source 1..20: mol_type = other DNA
agcctccgcctcctgggttc

SEQ ID NO: 12029 - DNA, 20 bp, synthetic construct
  misc_feature 1..20: note = Description of Artificial Sequence: Synthetic oligonucleotide
  misc_feature 1..20: note = Target: ANGPTL4; (+) strand; PAM type: NRG; PAM sequence: CAG
  source 1..20: mol_type = other DNA
ttcaagtgattctcctgcct

SEQ ID NO: 12030 - DNA, 20 bp, synthetic construct
  misc_feature 1..20: note = Description of Artificial Sequence: Synthetic oligonucleotide
  misc_feature 1..20: note = Target: ANGPTL4; (+) strand; PAM type: NRG; PAM sequence: GAG
  source 1..20: mol_type = other DNA
ttctcctgcctcagcctcct

SEQ ID NO: 12031 - DNA, 20 bp, synthetic construct
  misc_feature 1..20: note = Description of Artificial Sequence: Synthetic oligonucleotide
  misc_feature 1..20: note = Target: ANGPTL4; (+) strand; PAM type: NRG; PAM sequence: TAG
  source 1..20: mol_type = other DNA
tcctgcctcagcctcctgag

SEQ ID NO: 12032 - DNA, 20 bp, synthetic construct
  misc_feature 1..20: note = Description of Artificial Sequence: Synthetic oligonucleotide
  misc_feature 1..20: note = Target: ANGPTL4; (+) strand; PAM type: NRG; PAM sequence: TGG
  source 1..20: mol_type = other DNA
gcctcagcctcctgagtagc

SEQ ID NO: 12033 - DNA, 20 bp, synthetic construct
  misc_feature 1..20: note = Description of Artificial Sequence: Synthetic oligonucleotide
  misc_feature 1..20: note = Target: ANGPTL4; (+) strand; PAM type: NRG; PAM sequence: GGG
  source 1..20: mol_type = other DNA
cctcagcctcctgagtagct

SEQ ID NO: 12034 - DNA, 20 bp, synthetic construct
  misc_feature 1..20: note = Description of Artificial Sequence: Synthetic oligonucleotide
  misc_feature 1..20: note = Target: ANGPTL4; (+) strand; PAM type: NRG; PAM sequence: CAG
  source 1..20: mol_type = other DNA
ctcctgagtagctgggatta

SEQ ID NO: 12035 - DNA, 20 bp, synthetic construct
  misc_feature 1..20: note = Description of Artificial Sequence: Synthetic oligonucleotide
  misc_feature 1..20: note = Target: ANGPTL4; (+) strand; PAM type: NRG; PAM sequence: AGG
  source 1..20: mol_type = other DNA
tcctgagtagctgggattac

SEQ ID NO: 12036 - DNA, 20 bp, synthetic construct
  misc_feature 1..20: note = Description of Artificial Sequence: Synthetic oligonucleotide
  misc_feature 1..20: note = Target: ANGPTL4; (+) strand; PAM type: NRG; PAM sequence: CAG
  source 1..20: mol_type = other DNA
caggttcccgccaccatgca

SEQ ID NO: 12037 - DNA, 20 bp, synthetic construct
  misc_feature 1..20: note = Description of Artificial Sequence: Synthetic oligonucleotide
  misc_feature 1..20: note = Target: ANGPTL4; (+) strand; PAM type: NRG; PAM sequence: TAG
  source 1..20: mol_type = other DNA
agataattgttttgtatttt

SEQ ID NO: 12038 - DNA, 20 bp, synthetic construct
  misc_feature 1..20: note = Description of Artificial Sequence: Synthetic oligonucleotide
  misc_feature 1..20: note = Target: ANGPTL4; (+) strand; PAM type: NRG; PAM sequence: TAG
  source 1..20: mol_type = other DNA
taattgttttgtatttttag

SEQ ID NO: 12039 - DNA, 20 bp, synthetic construct
  misc_feature 1..20: note = Description of Artificial Sequence: Synthetic oligonucleotide
  misc_feature 1..20: note = Target: ANGPTL4; (+) strand; PAM type: NRG; PAM sequence: GAG
  source 1..20: mol_type = other DNA
attgttttgtatttttagta

SEQ ID NO: 12040 - DNA, 20 bp, synthetic construct
  misc_feature 1..20: note = Description of Artificial Sequence: Synthetic oligonucleotide
  misc_feature 1..20: note = Target: ANGPTL4; (+) strand; PAM type: NRG; PAM sequence: CGG
  source 1..20: mol_type = other DNA
ttttgtatttttagtagaga

SEQ ID NO: 12041 - DNA, 20 bp, synthetic construct
  misc_feature 1..20: note = Description of Artificial Sequence: Synthetic oligonucleotide
  misc_feature 1..20: note = Target: ANGPTL4; (+) strand; PAM type: NRG; PAM sequence: GGG
  source 1..20: mol_type = other DNA
tttgtatttttagtagagac

SEQ ID NO: 12042 - DNA, 20 bp, synthetic construct
  misc_feature 1..20: note = Description of Artificial Sequence: Synthetic oligonucleotide
  misc_feature 1..20: note = Target: ANGPTL4; (+) strand; PAM type: NRG; PAM sequence: GGG
  source 1..20: mol_type = other DNA
ttgtatttttagtagagacg

SEQ ID NO: 12043 - DNA, 20 bp, synthetic construct
  misc_feature 1..20: note = Description of Artificial Sequence: Synthetic oligonucleotide
  misc_feature 1..20: note = Target: ANGPTL4; (+) strand; PAM type: NRG; PAM sequence: TGG
  source 1..20: mol_type = other DNA
gagacggggtttcaccatgt

SEQ ID NO: 12044 - DNA, 20 bp, synthetic construct
  misc_feature 1..20: note = Description of Artificial Sequence: Synthetic oligonucleotide
  misc_feature 1..20: note = Target: ANGPTL4; (+) strand; PAM type: NRG; PAM sequence: CAG
  source 1..20: mol_type = other DNA
cggggtttcaccatgttggc

SEQ ID NO: 12045 - DNA, 20 bp, synthetic construct
  misc_feature 1..20: note = Description of Artificial Sequence: Synthetic oligonucleotide
  misc_feature 1..20: note = Target: ANGPTL4; (+) strand; PAM type: NRG; PAM sequence: AGG
  source 1..20: mol_type = other DNA
ggggtttcaccatgttggcc

SEQ ID NO: 12046 - DNA, 20 bp, synthetic construct
  misc_feature 1..20: note = Description of Artificial Sequence: Synthetic oligonucleotide
  misc_feature 1..20: note = Target: ANGPTL4; (+) strand; PAM type: NRG; PAM sequence: GGG
  source 1..20: mol_type = other DNA
gggtttcaccatgttggcca

SEQ ID NO: 12047 - DNA, 20 bp, synthetic construct
  misc_feature 1..20: note = Description of Artificial Sequence: Synthetic oligonucleotide
  misc_feature 1..20: note = Target: ANGPTL4; (+) strand; PAM type: NRG; PAM sequence: TGG
  source 1..20: mol_type = other DNA
tttcaccatgttggccaggg

SEQ ID NO: 12048 - DNA, 20 bp, synthetic construct
  misc_feature 1..20: note = Description of Artificial Sequence: Synthetic oligonucleotide
  misc_feature 1..20: note = Target: ANGPTL4; (+) strand; PAM type: NRG; PAM sequence: AAG
  source 1..20: mol_type = other DNA
ggtcttgaactcctgacctc

SEQ ID NO: 12049 - DNA, 20 bp, synthetic construct
  misc_feature 1..20: note = Description of Artificial Sequence: Synthetic oligonucleotide
  misc_feature 1..20: note = Target: ANGPTL4; (+) strand; PAM type: NRG; PAM sequence: CGG
  source 1..20: mol_type = other DNA
ctcaagtgatctgcccacct

SEQ ID NO: 12050 - DNA, 20 bp, synthetic construct
  misc_feature 1..20: note = Description of Artificial Sequence: Synthetic oligonucleotide
  misc_feature 1..20: note = Target: ANGPTL4; (+) strand; PAM type: NRG; PAM sequence: AAG
  source 1..20: mol_type = other DNA
ctgcccacctcggcctccca

SEQ ID NO: 12051 - DNA, 20 bp, synthetic construct
  misc_feature 1..20: note = Description of Artificial Sequence: Synthetic oligonucleotide
  misc_feature 1..20: note = Target: ANGPTL4; (+) strand; PAM type: NRG; PAM sequence: TGG
  source 1..20: mol_type = other DNA
acctcggcctcccaaagtgt

SEQ ID NO: 12052 - DNA, 20 bp, synthetic construct
  misc_feature 1..20: note = Description of Artificial Sequence: Synthetic oligonucleotide
  misc_feature 1..20: note = Target: ANGPTL4; (+) strand; PAM type: NRG; PAM sequence: GGG
  source 1..20: mol_type = other DNA
cctcggcctcccaaagtgtt

SEQ ID NO: 12053 - DNA, 20 bp, synthetic construct
  misc_feature 1..20: note = Description of Artificial Sequence: Synthetic oligonucleotide
  misc_feature 1..20: note = Target: ANGPTL4; (+) strand; PAM type: NRG; PAM sequence: CAG
  source 1..20: mol_type = other DNA
ctcccaaagtgttgggatta

SEQ ID NO: 12054 - DNA, 20 bp, synthetic construct
  misc_feature 1..20: note = Description of Artificial Sequence: Synthetic oligonucleotide
  misc_feature 1..20: note = Target: ANGPTL4; (+) strand; PAM type: NRG; PAM sequence: AGG
  source 1..20: mol_type = other DNA
tcccaaagtgttgggattac

SEQ ID NO: 12055 - DNA, 20 bp, synthetic construct
  misc_feature 1..20: note = Description of Artificial Sequence: Synthetic oligonucleotide
  misc_feature 1..20: note = Target: ANGPTL4; (+) strand; PAM type: NRG; PAM sequence: GAG
  source 1..20: mol_type = other DNA
agtgttgggattacaggcgt

SEQ ID NO: 12056 - DNA, 20 bp, synthetic construct
  misc_feature 1..20: note = Description of Artificial Sequence: Synthetic oligonucleotide
  misc_feature 1..20: note = Target: ANGPTL4; (+) strand; PAM type: NRG; PAM sequence: CGG
  source 1..20: mol_type = other DNA
caggcgtgagccacaatacc

SEQ ID NO: 12057 - DNA, 20 bp, synthetic construct
  misc_feature 1..20: note = Description of Artificial Sequence: Synthetic oligonucleotide
  misc_feature 1..20: note = Target: ANGPTL4; (+) strand; PAM type: NRG; PAM sequence: TGG
  source 1..20: mol_type = other DNA
ggccacaaacatctttataa

SEQ ID NO: 12058 - DNA, 20 bp, synthetic construct
  misc_feature 1..20: note = Description of Artificial Sequence: Synthetic oligonucleotide
  misc_feature 1..20: note = Target: ANGPTL4; (+) strand; PAM type: NRG; PAM sequence: CAG
  source 1..20: mol_type = other DNA
atctttataatggtgctcca

SEQ ID NO: 12059 - DNA, 20 bp, synthetic construct
  misc_feature 1..20: note = Description of Artificial Sequence: Synthetic oligonucleotide
  misc_feature 1..20: note = Target: ANGPTL4; (+) strand; PAM type: NRG; PAM sequence: AGG
  source 1..20: mol_type = other DNA
tctttataatggtgctccac

SEQ ID NO: 12060 - DNA, 20 bp, synthetic construct
  misc_feature 1..20: note = Description of Artificial Sequence: Synthetic oligonucleotide
  misc_feature 1..20: note = Target: ANGPTL4; (+) strand; PAM type: NRG; PAM sequence: CAG
  source 1..20: mol_type = other DNA
ttttttttttttttttgaaa

SEQ ID NO: 12061 - DNA, 20 bp, synthetic construct
  misc_feature 1..20: note = Description of Artificial Sequence: Synthetic oligonucleotide
  misc_feature 1..20: note = Target: ANGPTL4; (+) strand; PAM type: NRG; PAM sequence: AGG
  source 1..20: mol_type = other DNA
tttttttttttttttgaaac

SEQ ID NO: 12062 - DNA, 20 bp, synthetic construct
  misc_feature 1..20: note = Description of Artificial Sequence: Synthetic oligonucleotide
  misc_feature 1..20: note = Target: ANGPTL4; (+) strand; PAM type: NRG; PAM sequence: GGG
  source 1..20: mol_type = other DNA
ttttttttttttttgaaaca

SEQ ID NO: 12063 - DNA, 20 bp, synthetic construct
  misc_feature 1..20: note = Description of Artificial Sequence: Synthetic oligonucleotide
  misc_feature 1..20: note = Target: ANGPTL4; (+) strand; PAM type: NRG; PAM sequence: AAG
  source 1..20: mol_type = other DNA
agggtctcactctgttgcct

SEQ ID NO: 12064 - DNA, 20 bp, synthetic construct
  misc_feature 1..20: note = Description of Artificial Sequence: Synthetic oligonucleotide
  misc_feature 1..20: note = Target: ANGPTL4; (+) strand; PAM type: NRG; PAM sequence: TGG
  source 1..20: mol_type = other DNA
tctcactctgttgcctaagc

SEQ ID NO: 12065 - DNA, 20 bp, synthetic construct
  misc_feature 1..20: note = Description of Artificial Sequence: Synthetic oligonucleotide
  misc_feature 1..20: note = Target: ANGPTL4; (+) strand; PAM type: NRG; PAM sequence: GAG
  source 1..20: mol_type = other DNA
tcactctgttgcctaagctg

SEQ ID NO: 12066 - DNA, 20 bp, synthetic construct
  misc_feature 1..20: note = Description of Artificial Sequence: Synthetic oligonucleotide
  misc_feature 1..20: note = Target: ANGPTL4; (+) strand; PAM type: NRG; PAM sequence: CAG
  source 1..20: mol_type = other DNA
ctgttgcctaagctggagtg

SEQ ID NO: 12067 - DNA, 20 bp, synthetic construct
  misc_feature 1..20: note = Description of Artificial Sequence: Synthetic oligonucleotide
  misc_feature 1..20: note = Target: ANGPTL4; (+) strand; PAM type: NRG; PAM sequence: TGG
  source 1..20: mol_type = other DNA
ttgcctaagctggagtgcag

SEQ ID NO: 12068 - DNA, 20 bp, synthetic construct
  misc_feature 1..20: note = Description of Artificial Sequence: Synthetic oligonucleotide
  misc_feature 1..20: note = Target: ANGPTL4; (+) strand; PAM type: NRG; PAM sequence: CGG
  source 1..20: mol_type = other DNA
ggagtgcagtggtgcgatct

SEQ ID NO: 12069 - DNA, 20 bp, synthetic construct
  misc_feature 1..20: note = Description of Artificial Sequence: Synthetic oligonucleotide
  misc_feature 1..20: note = Target: ANGPTL4; (+) strand; PAM type: NRG; PAM sequence: CGG
  source 1..20: mol_type = other DNA
tcactgcaacctccacctcc

SEQ ID NO: 12070 - DNA, 20 bp, synthetic construct
  misc_feature 1..20: note = Description of Artificial Sequence: Synthetic oligonucleotide
  misc_feature 1..20: note = Target: ANGPTL4; (+) strand; PAM type: NRG; PAM sequence: GGG
  source 1..20: mol_type = other DNA
cactgcaacctccacctccc

SEQ ID NO: 12071 - DNA, 20 bp, synthetic construct
  misc_feature 1..20: note = Description of Artificial Sequence: Synthetic oligonucleotide
  misc_feature 1..20: note = Target: ANGPTL4; (+) strand; PAM type: NRG; PAM sequence: AAG
  source 1..20: mol_type = other DNA
aacctccacctcccgggttc

SEQ ID NO: 12072 - DNA, 20 bp, synthetic construct
  misc_feature 1..20: note = Description of Artificial Sequence: Synthetic oligonucleotide
  misc_feature 1..20: note = Target: ANGPTL4; (+) strand; PAM type: NRG; PAM sequence: TAG
  source 1..20: mol_type = other DNA
tctcaaaaaaaaaaaaaaat

SEQ ID NO: 12073 - DNA, 20 bp, synthetic construct
  misc_feature 1..20: note = Description of Artificial Sequence: Synthetic oligonucleotide
  misc_feature 1..20: note = Target: ANGPTL4; (+) strand; PAM type: NRG; PAM sequence: AGG
  source 1..20: mol_type = other DNA
ctcaaaaaaaaaaaaaaatt

SEQ ID NO: 12074 - DNA, 20 bp, synthetic construct
  misc_feature 1..20: note = Description of Artificial Sequence: Synthetic oligonucleotide
  misc_feature 1..20: note = Target: ANGPTL4; (+) strand; PAM type: NRG; PAM sequence: CGG
  source 1..20: mol_type = other DNA
aaaaaaaaaaaaattaggca

SEQ ID NO: 12075 - DNA, 20 bp, synthetic construct
  misc_feature 1..20: note = Description of Artificial Sequence: Synthetic oligonucleotide
  misc_feature 1..20: note = Target: ANGPTL4; (+) strand; PAM type: NRG; PAM sequence: TGG
  source 1..20: mol_type = other DNA
aaaaaaaaaattaggcacgg

SEQ ID NO: 12076 - DNA, 20 bp, synthetic construct
  misc_feature 1..20: note = Description of Artificial Sequence: Synthetic oligonucleotide
  misc_feature 1..20: note = Target: ANGPTL4; (+) strand; PAM type: NRG; PAM sequence: CAG
  source 1..20: mol_type = other DNA
gtggctcacacttgcaatcc

SEQ ID NO: 12077 - DNA, 20 bp, synthetic construct
  misc_feature 1..20: note = Description of Artificial Sequence: Synthetic oligonucleotide
  misc_feature 1..20: note = Target: ANGPTL4; (+) strand; PAM type: NRG; PAM sequence: TGG
  source 1..20: mol_type = other DNA
cacttgcaatcccagcactt

SEQ ID NO: 12078 - DNA, 20 bp, synthetic construct
  misc_feature 1..20: note = Description of Artificial Sequence: Synthetic oligonucleotide
  misc_feature 1..20: note = Target: ANGPTL4; (+) strand; PAM type: NRG; PAM sequence: GGG
  source 1..20: mol_type = other DNA
acttgcaatcccagcacttt

SEQ ID NO: 12079 - DNA, 20 bp, synthetic construct
  misc_feature 1..20: note = Description of Artificial Sequence: Synthetic oligonucleotide
  misc_feature 1..20: note = Target: ANGPTL4; (+) strand; PAM type: NRG; PAM sequence: GAG
  source 1..20: mol_type = other DNA
ttgcaatcccagcactttgg

SEQ ID NO: 12080 - DNA, 20 bp, synthetic construct
  misc_feature 1..20: note = Description of Artificial Sequence: Synthetic oligonucleotide
  misc_feature 1..20: note = Target: ANGPTL4; (+) strand; PAM type: NRG; PAM sequence: AGG
  source 1..20: mol_type = other DNA
tgcaatcccagcactttggg

SEQ ID NO: 12081 - DNA, 20 bp, synthetic construct
  misc_feature 1..20: note = Description of Artificial Sequence: Synthetic oligonucleotide
  misc_feature 1..20: note = Target: ANGPTL4; (+) strand; PAM type: NRG; PAM sequence: AAG
  source 1..20: mol_type = other DNA
cccagcactttgggaggctg

SEQ ID NO: 12082 - DNA, 20 bp, synthetic construct
  misc_feature 1..20: note = Description of Artificial Sequence: Synthetic oligonucleotide
  misc_feature 1..20: note = Target: ANGPTL4; (+) strand; PAM type: NRG; PAM sequence: GAG
  source 1..20: mol_type = other DNA
gcactttgggaggctgaagc

SEQ ID NO: 12083 - DNA, 20 bp, synthetic construct
  misc_feature 1..20: note = Description of Artificial Sequence: Synthetic oligonucleotide
  misc_feature 1..20: note = Target: ANGPTL4; (+) strand; PAM type: NRG; PAM sequence: TGG
  source 1..20: mol_type = other DNA
ctttgggaggctgaagcgag

SEQ ID NO: 12084 - DNA, 20 bp, synthetic construct
  misc_feature 1..20: note = Description of Artificial Sequence: Synthetic oligonucleotide
  misc_feature 1..20: note = Target: ANGPTL4; (+) strand; PAM type: NRG; PAM sequence: GAG
  source 1..20: mol_type = other DNA
ctgaagcgagtggatcactt

SEQ ID NO: 12085 - DNA, 20 bp, synthetic construct
  misc_feature 1..20: note = Description of Artificial Sequence: Synthetic oligonucleotide
  misc_feature 1..20: note = Target: ANGPTL4; (+) strand; PAM type: NRG; PAM sequence: CAG
  source 1..20: mol_type = other DNA
gcgagtggatcacttgagcc

SEQ ID NO: 12086 - DNA, 20 bp, synthetic construct
  misc_feature 1..20: note = Description of Artificial Sequence: Synthetic oligonucleotide
  misc_feature 1..20: note = Target: ANGPTL4; (+) strand; PAM type: NRG; PAM sequence: AGG
  source 1..20: mol_type = other DNA
cgagtggatcacttgagccc

SEQ ID NO: 12087 - DNA, 20 bp, synthetic construct
  misc_feature 1..20: note = Description of Artificial Sequence: Synthetic oligonucleotide
  misc_feature 1..20: note = Target: ANGPTL4; (+) strand; PAM type: NRG; PAM sequence: GAG
  source 1..20: mol_type = other DNA
agtggatcacttgagcccag

SEQ ID NO: 12088 - DNA, 20 bp, synthetic construct
  misc_feature 1..20: note = Description of Artificial Sequence: Synthetic oligonucleotide
  misc_feature 1..20: note = Target: ANGPTL4; (+) strand; PAM type: NRG; PAM sequence: GAG
  source 1..20: mol_type = other DNA
tgagcccaggagaccaatct

SEQ ID NO: 12089 - DNA, 20 bp, synthetic construct
  misc_feature 1..20: note = Description of Artificial Sequence: Synthetic oligonucleotide
  misc_feature 1..20: note = Target: ANGPTL4; (+) strand; PAM type: NRG; PAM sequence: CAG
  source 1..20: mol_type = other DNA
caggagaccaatctgagcaa

SEQ ID NO: 12090 - DNA, 20 bp, synthetic construct
  misc_feature 1..20: note = Description of Artificial Sequence: Synthetic oligonucleotide
  misc_feature 1..20: note = Target: ANGPTL4; (+) strand; PAM type: NRG; PAM sequence: AGG
  source 1..20: mol_type = other DNA
aggagaccaatctgagcaac

SEQ ID NO: 12091 - DNA, 20 bp, synthetic construct
  misc_feature 1..20: note = Description of Artificial Sequence: Synthetic oligonucleotide
  misc_feature 1..20: note = Target: ANGPTL4; (+) strand; PAM type: NRG; PAM sequence: GGG
  source 1..20: mol_type = other DNA
ggagaccaatctgagcaaca

SEQ ID NO: 12092 - DNA, 20 bp, synthetic construct
  misc_feature 1..20: note = Description of Artificial Sequence: Synthetic oligonucleotide
  misc_feature 1..20: note = Target: ANGPTL4; (+) strand; PAM type: NRG; PAM sequence: TAG
  source 1..20: mol_type = other DNA
caattaaaaatacaaaaaac

SEQ ID NO: 12093 - DNA, 20 bp, synthetic construct
  misc_feature 1..20: note = Description of Artificial Sequence: Synthetic oligonucleotide
  misc_feature 1..20: note = Target: ANGPTL4; (+) strand; PAM type: NRG; PAM sequence: TGG
  source 1..20: mol_type = other DNA
taaaaatacaaaaaactagc

SEQ ID NO: 12094 - DNA, 20 bp, synthetic construct
  misc_feature 1..20: note = Description of Artificial Sequence: Synthetic oligonucleotide
  misc_feature 1..20: note = Target: ANGPTL4; (+) strand; PAM type: NRG; PAM sequence: GGG
  source 1..20: mol_type = other DNA
aaaaatacaaaaaactagct

SEQ ID NO: 12095 - DNA, 20 bp, synthetic construct
  misc_feature 1..20: note = Description of Artificial Sequence: Synthetic oligonucleotide
  misc_feature 1..20: note = Target: ANGPTL4; (+) strand; PAM type: NRG; PAM sequence: TGG
  source 1..20: mol_type = other DNA
tacaaaaaactagctgggca

SEQ ID NO: 12096 - DNA, 20 bp, synthetic construct
  misc_feature 1..20: note = Description of Artificial Sequence: Synthetic oligonucleotide
  misc_feature 1..20: note = Target: ANGPTL4; (+) strand; PAM type: NRG; PAM sequence: TGG
  source 1..20: mol_type = other DNA
aaaaaactagctgggcatgg

SEQ ID NO: 12097 - DNA, 20 bp, synthetic construct
  misc_feature 1..20: note = Description of Artificial Sequence: Synthetic oligonucleotide
  misc_feature 1..20: note = Target: ANGPTL4; (+) strand; PAM type: NRG; PAM sequence: TGG
  source 1..20: mol_type = other DNA
tgcctgtgttcccatctact

SEQ ID NO: 12098 - DNA, 20 bp, synthetic construct
  misc_feature 1..20: note = Description of Artificial Sequence: Synthetic oligonucleotide
  misc_feature 1..20: note = Target: ANGPTL4; (+) strand; PAM type: NRG; PAM sequence: GGG
  source 1..20: mol_type = other DNA
gcctgtgttcccatctactt

SEQ ID NO: 12099 - DNA, 20 bp, synthetic construct
  misc_feature 1..20: note = Description of Artificial Sequence: Synthetic oligonucleotide
  misc_feature 1..20: note = Target: ANGPTL4; (+) strand; PAM type: NRG; PAM sequence: GAG
  source 1..20: mol_type = other DNA
ctgtgttcccatctacttgg

SEQ ID NO: 12100 - DNA, 20 bp, synthetic construct
  misc_feature 1..20: note = Description of Artificial Sequence: Synthetic oligonucleotide
  misc_feature 1..20: note = Target: ANGPTL4; (+) strand; PAM type: NRG; PAM sequence: AGG
  source 1..20: mol_type = other DNA
tgtgttcccatctacttggg

SEQ ID NO: 12101 - DNA, 20 bp, synthetic construct
  misc_feature 1..20: note = Description of Artificial Sequence: Synthetic oligonucleotide
  misc_feature 1..20: note = Target: ANGPTL4; (+) strand; PAM type: NRG; PAM sequence: GAG
  source 1..20: mol_type = other DNA
tcccatctacttgggaggct

SEQ ID NO: 12102 - DNA, 20 bp, synthetic construct
  misc_feature 1..20: note = Description of Artificial Sequence: Synthetic oligonucleotide
  misc_feature 1..20: note = Target: ANGPTL4; (+) strand; PAM type: NRG; PAM sequence: TGG
  source 1..20: mol_type = other DNA
atctacttgggaggctgagt

SEQ ID NO: 12103 - DNA, 20 bp, synthetic construct
  misc_feature 1..20: note = Description of Artificial Sequence: Synthetic oligonucleotide
  misc_feature 1..20: note = Target: ANGPTL4; (+) strand; PAM type: NRG; PAM sequence: GGG
  source 1..20: mol_type = other DNA
tctacttgggaggctgagtt

SEQ ID NO: 12104 - DNA, 20 bp, synthetic construct
  misc_feature 1..20: note = Description of Artificial Sequence: Synthetic oligonucleotide
  misc_feature 1..20: note = Target: ANGPTL4; (+) strand; PAM type: NRG; PAM sequence: GAG
  source 1..20: mol_type = other DNA
tacttgggaggctgagttgg

SEQ ID NO: 12105 - DNA, 20 bp, synthetic construct
  misc_feature 1..20: note = Description of Artificial Sequence: Synthetic oligonucleotide
  misc_feature 1..20: note = Target: ANGPTL4; (+) strand; PAM type: NRG; PAM sequence: AGG
  source 1..20: mol_type = other DNA
acttgggaggctgagttggg

SEQ ID NO: 12106 - DNA, 20 bp, synthetic construct
  misc_feature 1..20: note = Description of Artificial Sequence: Synthetic oligonucleotide
  misc_feature 1..20: note = Target: ANGPTL4; (+) strand; PAM type: NRG; PAM sequence: GAG
  source 1..20: mol_type = other DNA
ctgagttgggaggatctctt

SEQ ID NO: 12107 - DNA, 20 bp, synthetic construct
  misc_feature 1..20: note = Description of Artificial Sequence: Synthetic oligonucleotide
  misc_feature 1..20: note = Target: ANGPTL4; (+) strand; PAM type: NRG; PAM sequence: TAG
  source 1..20: mol_type = other DNA
ttgggaggatctcttgagcc

SEQ ID NO: 12108 - DNA, 20 bp, synthetic construct
  misc_feature 1..20: note = Description of Artificial Sequence: Synthetic oligonucleotide
  misc_feature 1..20: note = Target: ANGPTL4; (+) strand; PAM type: NRG; PAM sequence: AGG
  source 1..20: mol_type = other DNA
tgggaggatctcttgagcct

SEQ ID NO: 12109 - DNA, 20 bp, synthetic construct
  misc_feature 1..20: note = Description of Artificial Sequence: Synthetic oligonucleotide
  misc_feature 1..20: note = Target: ANGPTL4; (+) strand; PAM type: NRG; PAM sequence: GAG
  source 1..20: mol_type = other DNA
ggaggatctcttgagcctag

SEQ ID NO: 12110 - DNA, 20 bp, synthetic construct
  misc_feature 1..20: note = Description of Artificial Sequence: Synthetic oligonucleotide
  misc_feature 1..20: note = Target: ANGPTL4; (+) strand; PAM type: NRG; PAM sequence: AAG
  source 1..20: mol_type = other DNA
atctcttgagcctaggagat

SEQ ID NO: 12111 - DNA, 20 bp, synthetic construct
  misc_feature 1..20: note = Description of Artificial Sequence: Synthetic oligonucleotide
  misc_feature 1..20: note = Target: ANGPTL4; (+) strand; PAM type: NRG; PAM sequence: AGG
  source 1..20: mol_type = other DNA
tctcttgagcctaggagata

SEQ ID NO: 12112 - DNA, 20 bp, synthetic construct
  misc_feature 1..20: note = Description of Artificial Sequence: Synthetic oligonucleotide
  misc_feature 1..20: note = Target: ANGPTL4; (+) strand; PAM type: NRG; PAM sequence: CAG
  source 1..20: mol_type = other DNA
gagcctaggagataaggctg

SEQ ID NO: 12113 - DNA, 20 bp, synthetic construct
  misc_feature 1..20: note = Description of Artificial Sequence: Synthetic oligonucleotide
  misc_feature 1..20: note = Target: ANGPTL4; (+) strand; PAM type: NRG; PAM sequence: GAG
  source 1..20: mol_type = other DNA
ctaggagataaggctgcagt

SEQ ID NO: 12114 - DNA, 20 bp, synthetic construct
  misc_feature 1..20: note = Description of Artificial Sequence: Synthetic oligonucleotide
  misc_feature 1..20: note = Target: ANGPTL4; (+) strand; PAM type: NRG; PAM sequence: GAG
  source 1..20: mol_type = other DNA
agataaggctgcagtgagct

SEQ ID NO: 12115 - DNA, 20 bp, synthetic construct
  misc_feature 1..20: note = Description of Artificial Sequence: Synthetic oligonucleotide
  misc_feature 1..20: note = Target: ANGPTL4; (+) strand; PAM type: NRG; PAM sequence: AAG
  source 1..20: mol_type = other DNA
gagactgcgccactgcactc

SEQ ID NO: 12116 - DNA, 20 bp, synthetic construct
  misc_feature 1..20: note = Description of Artificial Sequence: Synthetic oligonucleotide
  misc_feature 1..20: note = Target: ANGPTL4; (+) strand; PAM type: NRG; PAM sequence: TGG
  source 1..20: mol_type = other DNA
tgcgccactgcactcaagcc

SEQ ID NO: 12117 - DNA, 20 bp, synthetic construct
  misc_feature 1..20: note = Description of Artificial Sequence: Synthetic oligonucleotide
  misc_feature 1..20: note = Target: ANGPTL4; (+) strand; PAM type: NRG; PAM sequence: GGG
  source 1..20: mol_type = other DNA
gcgccactgcactcaagcct

SEQ ID NO: 12118 - DNA, 20 bp, synthetic construct
  misc_feature 1..20: note = Description of Artificial Sequence: Synthetic oligonucleotide
  misc_feature 1..20: note = Target: ANGPTL4; (+) strand; PAM type: NRG; PAM sequence: CAG
  source 1..20: mol_type = other DNA
ctgcactcaagcctgggtga

SEQ ID NO: 12119 - DNA, 20 bp, synthetic construct
  misc_feature 1..20: note = Description of Artificial Sequence: Synthetic oligonucleotide
  misc_feature 1..20: note = Target: ANGPTL4; (+) strand; PAM type: NRG; PAM sequence: GAG
  source 1..20: mol_type = other DNA
gcactcaagcctgggtgaca

SEQ ID NO: 12120 - DNA, 20 bp, synthetic construct
  misc_feature 1..20: note = Description of Artificial Sequence: Synthetic oligonucleotide
  misc_feature 1..20: note = Target: ANGPTL4; (+) strand; PAM type: NRG; PAM sequence: GAG
  source 1..20: mol_type = other DNA
tcaagcctgggtgacagagt

SEQ ID NO: 12121 - DNA, 20 bp, synthetic construct
  misc_feature 1..20: note = Description of Artificial Sequence: Synthetic oligonucleotide
  misc_feature 1..20: note = Target: ANGPTL4; (+) strand; PAM type: NRG; PAM sequence: AAG
  source 1..20: mol_type = other DNA
gagtgagacccctgcctcaa

SEQ ID NO: 12122 - DNA, 20 bp, synthetic construct
  misc_feature 1..20: note = Description of Artificial Sequence: Synthetic oligonucleotide
  misc_feature 1..20: note = Target: ANGPTL4; (+) strand; PAM type: NRG; PAM sequence: AAG
  source 1..20: mol_type = other DNA
gacccctgcctcaaaagaaa

SEQ ID NO: 12123 - DNA, 20 bp, synthetic construct
  misc_feature 1..20: note = Description of Artificial Sequence: Synthetic oligonucleotide
  misc_feature 1..20: note = Target: ANGPTL4; (+) strand; PAM type: NRG; PAM sequence: CAG
  source 1..20: mol_type = other DNA
caaaagaaaaagaaaaaatg

SEQ ID NO: 12124 - DNA, 20 bp, synthetic construct
  misc_feature 1..20: note = Description of Artificial Sequence: Synthetic oligonucleotide
  misc_feature 1..20: note = Target: ANGPTL4; (+) strand; PAM type: NRG; PAM sequence: AGG
  source 1..20: mol_type = other DNA
aaaagaaaaagaaaaaatgc

SEQ ID NO: 12125 - DNA, 20 bp, synthetic construct
  misc_feature 1..20: note = Description of Artificial Sequence: Synthetic oligonucleotide
  misc_feature 1..20: note = Target: ANGPTL4; (+) strand; PAM type: NRG; PAM sequence: TGG
  source 1..20: mol_type = other DNA
aaaaagaaaaaatgcaggca

SEQ ID NO: 12126 - DNA, 20 bp, synthetic construct
  misc_feature 1..20: note = Description of Artificial Sequence: Synthetic oligonucleotide
  misc_feature 1..20: note = Target: ANGPTL4; (+) strand; PAM type: NRG; PAM sequence: TGG
  source 1..20: mol_type = other DNA
aagaaaaaatgcaggcatgg

SEQ ID NO: 12127 - DNA, 20 bp, synthetic construct
  misc_feature 1..20: note = Description of Artificial Sequence: Synthetic oligonucleotide
  misc_feature 1..20: note = Target: ANGPTL4; (+) strand; PAM type: NRG; PAM sequence: TGG
  source 1..20: mol_type = other DNA
ggcatggtggctcacacctg

SEQ ID NO: 12128 - DNA, 20 bp, synthetic construct
  misc_feature 1..20: note = Description of Artificial Sequence: Synthetic oligonucleotide
  misc_feature 1..20: note = Target: ANGPTL4; (+) strand; PAM type: NRG; PAM sequence: CAG
  source 1..20: mol_type = other DNA
gtggctcacacctgtggtcc

SEQ ID NO: 12129 - DNA, 20 bp, synthetic construct
  misc_feature 1..20: note = Description of Artificial Sequence: Synthetic oligonucleotide
  misc_feature 1..20: note = Target: ANGPTL4; (+) strand; PAM type: NRG; PAM sequence: TGG
  source 1..20: mol_type = other DNA
cacctgtggtcccagctact

SEQ ID NO: 12130 - DNA, 20 bp, synthetic construct
  misc_feature 1..20: note = Description of Artificial Sequence: Synthetic oligonucleotide
  misc_feature 1..20: note = Target: ANGPTL4; (+) strand; PAM type: NRG; PAM sequence: GGG
  source 1..20: mol_type = other DNA
acctgtggtcccagctactt

SEQ ID NO: 12131 - DNA, 20 bp, synthetic construct
  misc_feature 1..20: note = Description of Artificial Sequence: Synthetic oligonucleotide
  misc_feature 1..20: note = Target: ANGPTL4; (+) strand; PAM type: NRG; PAM sequence: GAG
  source 1..20: mol_type = other DNA
ctgtggtcccagctacttgg

SEQ ID NO: 12132 - DNA, 20 bp, synthetic construct
  misc_feature 1..20: note = Description of Artificial Sequence: Synthetic oligonucleotide
  misc_feature 1..20: note = Target: ANGPTL4; (+) strand; PAM type: NRG; PAM sequence: AGG
  source 1..20: mol_type = other DNA
tgtggtcccagctacttggg

SEQ ID NO: 12133 - DNA, 20 bp, synthetic construct
  misc_feature 1..20: note = Description of Artificial Sequence: Synthetic oligonucleotide
  misc_feature 1..20: note = Target: ANGPTL4; (+) strand; PAM type: NRG; PAM sequence: CAG
  source 1..20: mol_type = other DNA
tcccagctacttgggaggcc

SEQ ID NO: 12134 - DNA, 20 bp, synthetic construct
  misc_feature 1..20: note = Description of Artificial Sequence: Synthetic oligonucleotide
  misc_feature 1..20: note = Target: ANGPTL4; (+) strand; PAM type: NRG; PAM sequence: AGG
  source 1..20: mol_type = other DNA
cccagctacttgggaggccc

SEQ ID NO: 12135 - DNA, 20 bp, synthetic construct
  misc_feature 1..20: note = Description of Artificial Sequence: Synthetic oligonucleotide
  misc_feature 1..20: note = Target: ANGPTL4; (+) strand; PAM type: NRG; PAM sequence: AAG
  source 1..20: mol_type = other DNA
tacttgggaggcccaggtac

SEQ ID NO: 12136 - DNA, 20 bp, synthetic construct
  misc_feature 1..20: note = Description of Artificial Sequence: Synthetic oligonucleotide
  misc_feature 1..20: note = Target: ANGPTL4; (+) strand; PAM type: NRG; PAM sequence: GAG
  source 1..20: mol_type = other DNA
cccaggtacaagaatcactt

SEQ ID NO: 12137 - DNA, 20 bp, synthetic construct
  misc_feature 1..20: note = Description of Artificial Sequence: Synthetic oligonucleotide
  misc_feature 1..20: note = Target: ANGPTL4; (+) strand; PAM type: NRG; PAM sequence: AAG
  source 1..20: mol_type = other DNA
caagaatcacttgagcccgt

SEQ ID NO: 12138 - DNA, 20 bp, synthetic construct
  misc_feature 1..20: note = Description of Artificial Sequence: Synthetic oligonucleotide
  misc_feature 1..20: note = Target: ANGPTL4; (+) strand; PAM type: NRG; PAM sequence: AGG
  source 1..20: mol_type = other DNA
aagaatcacttgagcccgta

SEQ ID NO: 12139 - DNA, 20 bp, synthetic construct
  misc_feature 1..20: note = Description of Artificial Sequence: Synthetic oligonucleotide
  misc_feature 1..20: note = Target: ANGPTL4; (+) strand; PAM type: NRG; PAM sequence: GAG
  source 1..20: mol_type = other DNA
cgtaaggttgacgctgcatt

SEQ ID NO: 12140 - DNA, 20 bp, synthetic construct
  misc_feature 1..20: note = Description of Artificial Sequence: Synthetic oligonucleotide
  misc_feature 1..20: note = Target: ANGPTL4; (+) strand; PAM type: NRG; PAM sequence: CAG
  source 1..20: mol_type = other DNA
atcaccacaccactgcactc

SEQ ID NO: 12141 - DNA, 20 bp, synthetic construct
  misc_feature 1..20: note = Description of Artificial Sequence: Synthetic oligonucleotide
  misc_feature 1..20: note = Target: ANGPTL4; (+) strand; PAM type: NRG; PAM sequence: TGG
  source 1..20: mol_type = other DNA
cacaccactgcactccagcc

SEQ ID NO: 12142 - DNA, 20 bp, synthetic construct
  misc_feature 1..20: note = Description of Artificial Sequence: Synthetic oligonucleotide
  misc_feature 1..20: note = Target: ANGPTL4; (+) strand; PAM type: NRG; PAM sequence: GGG
  source 1..20: mol_type = other DNA
acaccactgcactccagcct

SEQ ID NO: 12143 - DNA, 20 bp, synthetic construct
  misc_feature 1..20: note = Description of Artificial Sequence: Synthetic oligonucleotide
  misc_feature 1..20: note = Target: ANGPTL4; (+) strand; PAM type: NRG; PAM sequence: TGG
  source 1..20: mol_type = other DNA
ctgcactccagcctgggcaa

SEQ ID NO: 12144 - DNA, 20 bp, synthetic construct
  misc_feature 1..20: note = Description of Artificial Sequence: Synthetic oligonucleotide
  misc_feature 1..20: note = Target: ANGPTL4; (+) strand; PAM type: NRG; PAM sequence: GAG
  source 1..20: mol_type = other DNA
gcactccagcctgggcaatg

SEQ ID NO: 12145 - DNA, 20 bp, synthetic construct
  misc_feature 1..20: note = Description of Artificial Sequence: Synthetic oligonucleotide
  misc_feature 1..20: note = Target: ANGPTL4; (+) strand; PAM type: NRG; PAM sequence: CAG
  source 1..20: mol_type = other DNA
tccagcctgggcaatggagc

SEQ ID NO: 12146 - DNA, 20 bp, synthetic construct
  misc_feature 1..20: note = Description of Artificial Sequence: Synthetic oligonucleotide
  misc_feature 1..20: note = Target: ANGPTL4; (+) strand; PAM type: NRG; PAM sequence: AGG
  source 1..20: mol_type = other DNA
ccagcctgggcaatggagcc

SEQ ID NO: 12147 - DNA, 20 bp, synthetic construct
  misc_feature 1..20: note = Description of Artificial Sequence: Synthetic oligonucleotide
  misc_feature 1..20: note = Target: ANGPTL4; (+) strand; PAM type: NRG; PAM sequence: AAG
  source 1..20: mol_type = other DNA
ttgtttttaaacttaaaaat

SEQ ID NO: 12148 - DNA, 20 bp, synthetic construct
  misc_feature 1..20: note = Description of Artificial Sequence: Synthetic oligonucleotide
  misc_feature 1..20: note = Target: ANGPTL4; (+) strand; PAM type: NRG; PAM sequence: AGG
  source 1..20: mol_type = other DNA
tgtttttaaacttaaaaata

SEQ ID NO: 12149 - DNA, 20 bp, synthetic construct
  misc_feature 1..20: note = Description of Artificial Sequence: Synthetic oligonucleotide
  misc_feature 1..20: note = Target: ANGPTL4; (+) strand; PAM type: NRG; PAM sequence: CGG
  source 1..20: mol_type = other DNA
tttaaacttaaaaataaggc

SEQ ID NO: 12150 - DNA, 20 bp, synthetic construct
  misc_feature 1..20: note = Description of Artificial Sequence: Synthetic oligonucleotide
  misc_feature 1..20: note = Target: ANGPTL4; (+) strand; PAM type: NRG; PAM sequence: GGG
  source 1..20: mol_type = other DNA
ttaaacttaaaaataaggcc

SEQ ID NO: 12151 - DNA, 20 bp, synthetic construct
  misc_feature 1..20: note = Description of Artificial Sequence: Synthetic oligonucleotide
  misc_feature 1..20: note = Target: ANGPTL4; (+) strand; PAM type: NRG; PAM sequence: TGG
  source 1..20: mol_type = other DNA
cttaaaaataaggccgggtg

SEQ ID NO: 12152 - DNA, 20 bp, synthetic construct
  misc_feature 1..20: note = Description of Artificial Sequence: Synthetic oligonucleotide
  misc_feature 1..20: note = Target: ANGPTL4; (+) strand; PAM type: NRG; PAM sequence: GGG
  source 1..20: mol_type = other DNA
ttaaaaataaggccgggtgt

SEQ ID NO: 12153 - DNA, 20 bp, synthetic construct
  misc_feature 1..20: note = Description of Artificial Sequence: Synthetic oligonucleotide
  misc_feature 1..20: note = Target: ANGPTL4; (+) strand; PAM type: NRG; PAM sequence: GGG
  source 1..20: mol_type = other DNA
taaaaataaggccgggtgtg

SEQ ID NO: 12154 - DNA, 20 bp, synthetic construct
  misc_feature 1..20: note = Description of Artificial Sequence: Synthetic oligonucleotide
  misc_feature 1..20: note = Target: ANGPTL4; (+) strand; PAM type: NRG; PAM sequence: GGG
  source 1..20: mol_type = other DNA
aaaaataaggccgggtgtgg

SEQ ID NO: 12155 - DNA, 20 bp, synthetic construct
  misc_feature 1..20: note = Description of Artificial Sequence: Synthetic oligonucleotide
  misc_feature 1..20: note = Target: ANGPTL4; (+) strand; PAM type: NRG; PAM sequence: CAG
  source 1..20: mol_type = other DNA
ggggctcacacctgtaatcc

SEQ ID NO: 12156 - DNA, 20 bp, synthetic construct
  misc_feature 1..20: note = Description of Artificial Sequence: Synthetic oligonucleotide
  misc_feature 1..20: note = Target: ANGPTL4; (+) strand; PAM type: NRG; PAM sequence: TGG
  source 1..20: mol_type = other DNA
cacctgtaatcccagcactt

SEQ ID NO: 12157 - DNA, 20 bp, synthetic construct
  misc_feature 1..20: note = Description of Artificial Sequence: Synthetic oligonucleotide
  misc_feature 1..20: note = Target: ANGPTL4; (+) strand; PAM type: NRG; PAM sequence: GGG
  source 1..20: mol_type = other DNA
acctgtaatcccagcacttt

SEQ ID NO: 12158 - DNA, 20 bp, synthetic construct
  misc_feature 1..20: note = Description of Artificial Sequence: Synthetic oligonucleotide
  misc_feature 1..20: note = Target: ANGPTL4; (+) strand; PAM type: NRG; PAM sequence: GAG
  source 1..20: mol_type = other DNA
ctgtaatcccagcactttgg

SEQ ID NO: 12159 - DNA, 20 bp, synthetic construct
  misc_feature 1..20: note = Description of Artificial Sequence: Synthetic oligonucleotide
  misc_feature 1..20: note = Target: ANGPTL4; (+) strand; PAM type: NRG; PAM sequence: AGG
  source 1..20: mol_type = other DNA
tgtaatcccagcactttggg

SEQ ID NO: 12160 - DNA, 20 bp, synthetic construct
  misc_feature 1..20: note = Description of Artificial Sequence: Synthetic oligonucleotide
  misc_feature 1..20: note = Target: ANGPTL4; (+) strand; PAM type: NRG; PAM sequence: GAG
  source 1..20: mol_type = other DNA
tcccagcactttgggaggcc

SEQ ID NO: 12161 - DNA, 20 bp, synthetic construct
  misc_feature 1..20: note = Description of Artificial Sequence: Synthetic oligonucleotide
  misc_feature 1..20: note = Target: ANGPTL4; (+) strand; PAM type: NRG; PAM sequence: AGG
  source 1..20: mol_type = other DNA
cccagcactttgggaggccg

SEQ ID NO: 12162 - DNA, 20 bp, synthetic construct
  misc_feature 1..20: note = Description of Artificial Sequence: Synthetic oligonucleotide
  misc_feature 1..20: note = Target: ANGPTL4; (+) strand; PAM type: NRG; PAM sequence: TGG
  source 1..20: mol_type = other DNA
agcactttgggaggccgagg

SEQ ID NO: 12163 - DNA, 20 bp, synthetic construct
  misc_feature 1..20: note = Description of Artificial Sequence: Synthetic oligonucleotide
  misc_feature 1..20: note = Target: ANGPTL4; (+) strand; PAM type: NRG; PAM sequence: GGG
  source 1..20: mol_type = other DNA
gcactttgggaggccgaggt

SEQ ID NO: 12164 - DNA, 20 bp, synthetic construct
  misc_feature 1..20: note = Description of Artificial Sequence: Synthetic oligonucleotide
  misc_feature 1..20: note = Target: ANGPTL4; (+) strand; PAM type: NRG; PAM sequence: TGG
  source 1..20: mol_type = other DNA
ctttgggaggccgaggtggg

SEQ ID NO: 12165 - DNA, 20 bp, synthetic construct
  misc_feature 1..20: note = Description of Artificial Sequence: Synthetic oligonucleotide
  misc_feature 1..20: note = Target: ANGPTL4; (+) strand; PAM type: NRG; PAM sequence: GAG
  source 1..20: mol_type = other DNA
ccgaggtgggtggatcacct

SEQ ID NO: 12166 - DNA, 20 bp, synthetic construct
  misc_feature 1..20: note = Description of Artificial Sequence: Synthetic oligonucleotide
  misc_feature 1..20: note = Target: ANGPTL4; (+) strand; PAM type: NRG; PAM sequence: AGG
  source 1..20: mol_type = other DNA
cgaggtgggtggatcacctg

SEQ ID NO: 12167 - DNA, 20 bp, synthetic construct
  misc_feature 1..20: note = Description of Artificial Sequence: Synthetic oligonucleotide
  misc_feature 1..20: note = Target: ANGPTL4; (+) strand; PAM type: NRG; PAM sequence: CAG
  source 1..20: mol_type = other DNA
gtgggtggatcacctgaggt

SEQ ID NO: 12168 - DNA, 20 bp, synthetic construct
  misc_feature 1..20: note = Description of Artificial Sequence: Synthetic oligonucleotide
  misc_feature 1..20: note = Target: ANGPTL4; (+) strand; PAM type: NRG; PAM sequence: AGG
  source 1..20: mol_type = other DNA
tgggtggatcacctgaggtc

SEQ ID NO: 12169 - DNA, 20 bp, synthetic construct
  misc_feature 1..20: note = Description of Artificial Sequence: Synthetic oligonucleotide
  misc_feature 1..20: note = Target: ANGPTL4; (+) strand; PAM type: NRG; PAM sequence: GAG
  source 1..20: mol_type = other DNA
ggtggatcacctgaggtcag

SEQ ID NO: 12170 - DNA, 20 bp, synthetic construct
  misc_feature 1..20: note = Description of Artificial Sequence: Synthetic oligonucleotide
  misc_feature 1..20: note = Target: ANGPTL4; (+) strand; PAM type: NRG; PAM sequence: TAG
  source 1..20: mol_type = other DNA
tgaggtcaggagttcaaaac

SEQ ID NO: 12171 - DNA, 20 bp, synthetic construct
  misc_feature 1..20: note = Description of Artificial Sequence: Synthetic oligonucleotide
  misc_feature 1..20: note = Target: ANGPTL4; (+) strand; PAM type: NRG; PAM sequence: TGG
  source 1..20: mol_type = other DNA
tcaggagttcaaaactagcc

SEQ ID NO: 12172 - DNA, 20 bp, synthetic construct
  misc_feature 1..20: note = Description of Artificial Sequence: Synthetic oligonucleotide
  misc_feature 1..20: note = Target: ANGPTL4; (+) strand; PAM type: NRG; PAM sequence: TGG
  source 1..20: mol_type = other DNA
caaaactagcctggccaaca

SEQ ID NO: 12173 - DNA, 20 bp, synthetic construct
  misc_feature 1..20: note = Description of Artificial Sequence: Synthetic oligonucleotide
  misc_feature 1..20: note = Target: ANGPTL4; (+) strand; PAM type: NRG; PAM sequence: TAG
  source 1..20: mol_type = other DNA
tctactaaaaatacaaaaat

SEQ ID NO: 12174 - DNA, 20 bp, synthetic construct
  misc_feature 1..20: note = Description of Artificial Sequence: Synthetic oligonucleotide
  misc_feature 1..20: note = Target: ANGPTL4; (+) strand; PAM type: NRG; PAM sequence: AGG
  source 1..20: mol_type = other DNA
ctactaaaaatacaaaaatt

SEQ ID NO: 12175 - DNA, 20 bp, synthetic construct
  misc_feature 1..20: note = Description of Artificial Sequence: Synthetic oligonucleotide
  misc_feature 1..20: note = Target: ANGPTL4; (+) strand; PAM type: NRG; PAM sequence: CAG
  source 1..20: mol_type = other DNA
taaaaatacaaaaattaggc

SEQ ID NO: 12176 - DNA, 20 bp, synthetic construct
  misc_feature 1..20: note = Description of Artificial Sequence: Synthetic oligonucleotide
  misc_feature 1..20: note = Target: ANGPTL4; (+) strand; PAM type: NRG; PAM sequence: AGG
  source 1..20: mol_type = other DNA
aaaaatacaaaaattaggcc

SEQ ID NO: 12177 - DNA, 20 bp, synthetic construct
  misc_feature 1..20: note = Description of Artificial Sequence: Synthetic oligonucleotide
  misc_feature 1..20: note = Target: ANGPTL4; (+) strand; PAM type: NRG; PAM sequence: CAG
  source 1..20: mol_type = other DNA
tacaaaaattaggccaggcg

SEQ ID NO: 12178 - DNA, 20 bp, synthetic construct
  misc_feature 1..20: note = Description of Artificial Sequence: Synthetic oligonucleotide
  misc_feature 1..20: note = Target: ANGPTL4; (+) strand; PAM type: NRG; PAM sequence: TGG
  source 1..20: mol_type = other DNA
aaaaattaggccaggcgcag

SEQ ID NO: 12179 - DNA, 20 bp, synthetic construct
  misc_feature 1..20: note = Description of Artificial Sequence: Synthetic oligonucleotide
  misc_feature 1..20: note = Target: ANGPTL4; (+) strand; PAM type: NRG; PAM sequence: GGG
  source 1..20: mol_type = other DNA
aaaattaggccaggcgcagt

SEQ ID NO: 12180 - DNA, 20 bp, synthetic construct
  misc_feature 1..20: note = Description of Artificial Sequence: Synthetic oligonucleotide
  misc_feature 1..20: note = Target: ANGPTL4; (+) strand; PAM type: NRG; PAM sequence: CAG
  source 1..20: mol_type = other DNA
gtgggtcatacctgtaatcc

SEQ ID NO: 12181 - DNA, 20 bp, synthetic construct
  misc_feature 1..20: note = Description of Artificial Sequence: Synthetic oligonucleotide
  misc_feature 1..20: note = Target: ANGPTL4; (+) strand; PAM type: NRG; PAM sequence: TGG
  source 1..20: mol_type = other DNA
tacctgtaatcccagcactt

SEQ ID NO: 12182 - DNA, 20 bp, synthetic construct
  misc_feature 1..20: note = Description of Artificial Sequence: Synthetic oligonucleotide
  misc_feature 1..20: note = Target: ANGPTL4; (+) strand; PAM type: NRG; PAM sequence: GGG
  source 1..20: mol_type = other DNA
acctgtaatcccagcacttt

SEQ ID NO: 12183 - DNA, 20 bp, synthetic construct
  misc_feature 1..20: note = Description of Artificial Sequence: Synthetic oligonucleotide
  misc_feature 1..20: note = Target: ANGPTL4; (+) strand; PAM type: NRG; PAM sequence: GAG
  source 1..20: mol_type = other DNA
ctgtaatcccagcactttgg

SEQ ID NO: 12184 - DNA, 20 bp, synthetic construct
  misc_feature 1..20: note = Description of Artificial Sequence: Synthetic oligonucleotide
  misc_feature 1..20: note = Target: ANGPTL4; (+) strand; PAM type: NRG; PAM sequence: AGG
  source 1..20: mol_type = other DNA
tgtaatcccagcactttggg

SEQ ID NO: 12185 - DNA, 20 bp, synthetic construct
  misc_feature 1..20: note = Description of Artificial Sequence: Synthetic oligonucleotide
  misc_feature 1..20: note = Target: ANGPTL4; (+) strand; PAM type: NRG; PAM sequence: GAG
  source 1..20: mol_type = other DNA
tcccagcactttgggaggct

SEQ ID NO: 12186 - DNA, 20 bp, synthetic construct
  misc_feature 1..20: note = Description of Artificial Sequence: Synthetic oligonucleotide
  misc_feature 1..20: note = Target: ANGPTL4; (+) strand; PAM type: NRG; PAM sequence: AGG
  source 1..20: mol_type = other DNA
cccagcactttgggaggctg

SEQ ID NO: 12187 - DNA, 20 bp, synthetic construct
  misc_feature 1..20: note = Description of Artificial Sequence: Synthetic oligonucleotide
  misc_feature 1..20: note = Target: ANGPTL4; (+) strand; PAM type: NRG; PAM sequence: GAG
  source 1..20: mol_type = other DNA
cagcactttgggaggctgag

SEQ ID NO: 12188 - DNA, 20 bp, synthetic construct
  misc_feature 1..20: note = Description of Artificial Sequence: Synthetic oligonucleotide
  misc_feature 1..20: note = Target: ANGPTL4; (+) strand; PAM type: NRG; PAM sequence: AGG
  source 1..20: mol_type = other DNA
agcactttgggaggctgagg

SEQ ID NO: 12189 - DNA, 20 bp, synthetic construct
  misc_feature 1..20: note = Description of Artificial Sequence: Synthetic oligonucleotide
  misc_feature 1..20: note = Target: ANGPTL4; (+) strand; PAM type: NRG; PAM sequence: GGG
  source 1..20: mol_type = other DNA
gcactttgggaggctgagga

SEQ ID NO: 12190 - DNA, 20 bp, synthetic construct
  misc_feature 1..20: note = Description of Artificial Sequence: Synthetic oligonucleotide
  misc_feature 1..20: note = Target: ANGPTL4; (+) strand; PAM type: NRG; PAM sequence: TGG
  source 1..20: mol_type = other DNA
ctttgggaggctgaggaggg

SEQ ID NO: 12191 - DNA, 20 bp, synthetic construct
  misc_feature 1..20: note = Description of Artificial Sequence: Synthetic oligonucleotide
  misc_feature 1..20: note = Target: ANGPTL4; (+) strand; PAM type: NRG; PAM sequence: GAG
  source 1..20: mol_type = other DNA
ctgaggagggtggatcacat

SEQ ID NO: 12192 - DNA, 20 bp, synthetic construct
  misc_feature 1..20: note = Description of Artificial Sequence: Synthetic oligonucleotide
  misc_feature 1..20: note = Target: ANGPTL4; (+) strand; PAM type: NRG; PAM sequence: AGG
  source 1..20: mol_type = other DNA
tgaggagggtggatcacatg

SEQ ID NO: 12193 - DNA, 20 bp, synthetic construct
  misc_feature 1..20: note = Description of Artificial Sequence: Synthetic oligonucleotide
  misc_feature 1..20: note = Target: ANGPTL4; (+) strand; PAM type: NRG; PAM sequence: AAG
  source 1..20: mol_type = other DNA
gagggtggatcacatgaggt

SEQ ID NO: 12194 - DNA, 20 bp, synthetic construct
  misc_feature 1..20: note = Description of Artificial Sequence: Synthetic oligonucleotide
  misc_feature 1..20: note = Target: ANGPTL4; (+) strand; PAM type: NRG; PAM sequence: AGG
  source 1..20: mol_type = other DNA
agggtggatcacatgaggta

SEQ ID NO: 12195 - DNA, 20 bp, synthetic construct
  misc_feature 1..20: note = Description of Artificial Sequence: Synthetic oligonucleotide
  misc_feature 1..20: note = Target: ANGPTL4; (+) strand; PAM type: NRG; PAM sequence: GAG
  source 1..20: mol_type = other DNA
ggtggatcacatgaggtaag

SEQ ID NO: 12196 - DNA, 20 bp, synthetic construct
  misc_feature 1..20: note = Description of Artificial Sequence: Synthetic oligonucleotide
  misc_feature 1..20: note = Target: ANGPTL4; (+) strand; PAM type: NRG; PAM sequence: GAG
  source 1..20: mol_type = other DNA
tcacatgaggtaaggagttt

SEQ ID NO: 12197 - DNA, 20 bp, synthetic construct
  misc_feature 1..20: note = Description of Artificial Sequence: Synthetic oligonucleotide
  misc_feature 1..20: note = Target: ANGPTL4; (+) strand; PAM type: NRG; PAM sequence: TGG
  source 1..20: mol_type = other DNA
taaggagtttgagaccaacc

SEQ ID NO: 12198 - DNA, 20 bp, synthetic construct
  misc_feature 1..20: note = Description of Artificial Sequence: Synthetic oligonucleotide
  misc_feature 1..20: note = Target: ANGPTL4; (+) strand; PAM type: NRG; PAM sequence: TGG
  source 1..20: mol_type = other DNA
tgagaccaacctggccaaca

SEQ ID NO: 12199 - DNA, 20 bp, synthetic construct
  misc_feature 1..20: note = Description of Artificial Sequence: Synthetic oligonucleotide
  misc_feature 1..20: note = Target: ANGPTL4; (+) strand; PAM type: NRG; PAM sequence: TAG
  source 1..20: mol_type = other DNA
actactaaaaatacaaaaac

SEQ ID NO: 12200 - DNA, 20 bp, synthetic construct
  misc_feature 1..20: note = Description of Artificial Sequence: Synthetic oligonucleotide
  misc_feature 1..20: note = Target: ANGPTL4; (+) strand; PAM type: NRG; PAM sequence: CAG
  source 1..20: mol_type = other DNA
ctaaaaatacaaaaactagc

SEQ ID NO: 12201 - DNA, 20 bp, synthetic construct
  misc_feature 1..20: note = Description of Artificial Sequence: Synthetic oligonucleotide
  misc_feature 1..20: note = Target: ANGPTL4; (+) strand; PAM type: NRG; PAM sequence: AGG
  source 1..20: mol_type = other DNA
taaaaatacaaaaactagcc

SEQ ID NO: 12202 - DNA, 20 bp, synthetic construct
  misc_feature 1..20: note = Description of Artificial Sequence: Synthetic oligonucleotide
  misc_feature 1..20: note = Target: ANGPTL4; (+) strand; PAM type: NRG; PAM sequence: TGG
  source 1..20: mol_type = other DNA
atacaaaaactagccaggcg

SEQ ID NO: 12203 - DNA, 20 bp, synthetic construct
  misc_feature 1..20: note = Description of Artificial Sequence: Synthetic oligonucleotide
  misc_feature 1..20: note = Target: ANGPTL4; (+) strand; PAM type: NRG; PAM sequence: TGG
  source 1..20: mol_type = other DNA
caaaaactagccaggcgtgg

SEQ ID NO: 12204 - DNA, 20 bp, synthetic construct
  misc_feature 1..20: note = Description of Artificial Sequence: Synthetic oligonucleotide
  misc_feature 1..20: note = Target: ANGPTL4; (+) strand; PAM type: NRG; PAM sequence: CGG
  source 1..20: mol_type = other DNA
aaactagccaggcgtggtgg

SEQ ID NO: 12205 - DNA, 20 bp, synthetic construct
  misc_feature 1..20: note = Description of Artificial Sequence: Synthetic oligonucleotide
  misc_feature 1..20: note = Target: ANGPTL4; (+) strand; PAM type: NRG; PAM sequence: GGG
  source 1..20: mol_type = other DNA
aactagccaggcgtggtggc

SEQ ID NO: 12206 - DNA, 20 bp, synthetic construct
  misc_feature 1..20: note = Description of Artificial Sequence: Synthetic oligonucleotide
  misc_feature 1..20: note = Target: ANGPTL4; (+) strand; PAM type: NRG; PAM sequence: CGG
  source 1..20: mol_type = other DNA
gtggcgggtgcctgtaatcc

SEQ ID NO: 12207 - DNA, 20 bp, synthetic construct
  misc_feature 1..20: note = Description of Artificial Sequence: Synthetic oligonucleotide
  misc_feature 1..20: note = Target: ANGPTL4; (+) strand; PAM type: NRG; PAM sequence: CAG
  source 1..20: mol_type = other DNA
tgcctgtaatcccggctact

SEQ ID NO: 12208 - DNA, 20 bp, synthetic construct
  misc_feature 1..20: note = Description of Artificial Sequence: Synthetic oligonucleotide
  misc_feature 1..20: note = Target: ANGPTL4; (+) strand; PAM type: NRG; PAM sequence: AGG
  source 1..20: mol_type = other DNA
gcctgtaatcccggctactc

SEQ ID NO: 12209 - DNA, 20 bp, synthetic construct
  misc_feature 1..20: note = Description of Artificial Sequence: Synthetic oligonucleotide
  misc_feature 1..20: note = Target: ANGPTL4; (+) strand; PAM type: NRG; PAM sequence: GAG
  source 1..20: mol_type = other DNA
ctgtaatcccggctactcag

SEQ ID NO: 12210 - DNA, 20 bp, synthetic construct
  misc_feature 1..20: note = Description of Artificial Sequence: Synthetic oligonucleotide
  misc_feature 1..20: note = Target: ANGPTL4; (+) strand; PAM type: NRG; PAM sequence: AGG
  source 1..20: mol_type = other DNA
tgtaatcccggctactcagg

SEQ ID NO: 12211 - DNA, 20 bp, synthetic construct
  misc_feature 1..20: note = Description of Artificial Sequence: Synthetic oligonucleotide
  misc_feature 1..20: note = Target: ANGPTL4; (+) strand; PAM type: NRG; PAM sequence: GAG
  source 1..20: mol_type = other DNA
tcccggctactcaggaggct

SEQ ID NO: 12212 - DNA, 20 bp, synthetic construct
  misc_feature 1..20: note = Description of Artificial Sequence: Synthetic oligonucleotide
  misc_feature 1..20: note = Target: ANGPTL4; (+) strand; PAM type: NRG; PAM sequence: AGG
  source 1..20: mol_type = other DNA
cccggctactcaggaggctg

SEQ ID NO: 12213 - DNA, 20 bp, synthetic construct
  misc_feature 1..20: note = Description of Artificial Sequence: Synthetic oligonucleotide
  misc_feature 1..20: note = Target: ANGPTL4; (+) strand; PAM type: NRG; PAM sequence: GAG
  source 1..20: mol_type = other DNA
tactcaggaggctgaggcat

SEQ ID NO: 12214 - DNA, 20 bp, synthetic construct
  misc_feature 1..20: note = Description of Artificial Sequence: Synthetic oligonucleotide
  misc_feature 1..20: note = Target: ANGPTL4; (+) strand; PAM type: NRG; PAM sequence: TGG
  source 1..20: mol_type = other DNA
gcatgagaatcccttgaacc

SEQ ID NO: 12215 - DNA, 20 bp, synthetic construct
  misc_feature 1..20: note = Description of Artificial Sequence: Synthetic oligonucleotide
  misc_feature 1..20: note = Target: ANGPTL4; (+) strand; PAM type: NRG; PAM sequence: GGG
  source 1..20: mol_type = other DNA
catgagaatcccttgaacct

SEQ ID NO: 12216 - DNA, 20 bp, synthetic construct
  misc_feature 1..20: note = Description of Artificial Sequence: Synthetic oligonucleotide
  misc_feature 1..20: note = Target: ANGPTL4; (+) strand; PAM type: NRG; PAM sequence: GAG
  source 1..20: mol_type = other DNA
tgagaatcccttgaacctgg

SEQ ID NO: 12217 - DNA, 20 bp, synthetic construct
  misc_feature 1..20: note = Description of Artificial Sequence: Synthetic oligonucleotide
  misc_feature 1..20: note = Target: ANGPTL4; (+) strand; PAM type: NRG; PAM sequence: AGG
  source 1..20: mol_type = other DNA
gagaatcccttgaacctggg

SEQ ID NO: 12218 - DNA, 20 bp, synthetic construct
  misc_feature 1..20: note = Description of Artificial Sequence: Synthetic oligonucleotide
  misc_feature 1..20: note = Target: ANGPTL4; (+) strand; PAM type: NRG; PAM sequence: CAG
  source 1..20: mol_type = other DNA
aatcccttgaacctgggagg

SEQ ID NO: 12219 - DNA, 20 bp, synthetic construct
  misc_feature 1..20: note = Description of Artificial Sequence: Synthetic oligonucleotide
  misc_feature 1..20: note = Target: ANGPTL4; (+) strand; PAM type: NRG; PAM sequence: GAG
  source 1..20: mol_type = other DNA
tcccttgaacctgggaggca

SEQ ID NO: 12220 - DNA, 20 bp, synthetic construct
  misc_feature 1..20: note = Description of Artificial Sequence: Synthetic oligonucleotide
  misc_feature 1..20: note = Target: ANGPTL4; (+) strand; PAM type: NRG; PAM sequence: AGG
  source 1..20: mol_type = other DNA
cccttgaacctgggaggcag

SEQ ID NO: 12221 - DNA, 20 bp, synthetic construct
  misc_feature 1..20: note = Description of Artificial Sequence: Synthetic oligonucleotide
  misc_feature 1..20: note = Target: ANGPTL4; (+) strand; PAM type: NRG; PAM sequence: CAG
  source 1..20: mol_type = other DNA
gaacctgggaggcagaggtg

SEQ ID NO: 12222 - DNA, 20 bp, synthetic construct
  misc_feature 1..20: note = Description of Artificial Sequence: Synthetic oligonucleotide
  misc_feature 1..20: note = Target: ANGPTL4; (+) strand; PAM type: NRG; PAM sequence: GAG
  source 1..20: mol_type = other DNA
ctgggaggcagaggtgcagt

SEQ ID NO: 12223 - DNA, 20 bp, synthetic construct
  misc_feature 1..20: note = Description of Artificial Sequence: Synthetic oligonucleotide
  misc_feature 1..20: note = Target: ANGPTL4; (+) strand; PAM type: NRG; PAM sequence: GAG
  source 1..20: mol_type = other DNA
aggcagaggtgcagtgagcc

SEQ ID NO: 12224 - DNA, 20 bp, synthetic construct
  misc_feature 1..20: note = Description of Artificial Sequence: Synthetic oligonucleotide
  misc_feature 1..20: note = Target: ANGPTL4; (+) strand; PAM type: NRG; PAM sequence: CAG
  source 1..20: mol_type = other DNA
gagattgtgccactgcactc

SEQ ID NO: 12225 - DNA, 20 bp, synthetic construct
  misc_feature 1..20: note = Description of Artificial Sequence: Synthetic oligonucleotide
  misc_feature 1..20: note = Target: ANGPTL4; (+) strand; PAM type: NRG; PAM sequence: TGG
  source 1..20: mol_type = other DNA
tgtgccactgcactccagcc

SEQ ID NO: 12226 - DNA, 20 bp, synthetic construct
  misc_feature 1..20: note = Description of Artificial Sequence: Synthetic oligonucleotide
  misc_feature 1..20: note = Target: ANGPTL4; (+) strand; PAM type: NRG; PAM sequence: GGG
  source 1..20: mol_type = other DNA
gtgccactgcactccagcct

SEQ ID NO: 12227 - DNA, 20 bp, synthetic construct
  misc_feature 1..20: note = Description of Artificial Sequence: Synthetic oligonucleotide
  misc_feature 1..20: note = Target: ANGPTL4; (+) strand; PAM type: NRG; PAM sequence: GAG
  source 1..20: mol_type = other DNA
gccactgcactccagcctgg

SEQ ID NO: 12228 - DNA, 20 bp, synthetic construct
  misc_feature 1..20: note = Description of Artificial Sequence: Synthetic oligonucleotide
  misc_feature 1..20: note = Target: ANGPTL4; (+) strand; PAM type: NRG; PAM sequence: TAG
  source 1..20: mol_type = other DNA
ctgcactccagcctgggaga

SEQ ID NO: 12229 - DNA, 20 bp, synthetic construct
  misc_feature 1..20: note = Description of Artificial Sequence: Synthetic oligonucleotide
  misc_feature 1..20: note = Target: ANGPTL4; (+) strand; PAM type: NRG; PAM sequence: GAG
  source 1..20: mol_type = other DNA
gcactccagcctgggagata

SEQ ID NO: 12230 - DNA, 20 bp, synthetic construct
  misc_feature 1..20: note = Description of Artificial Sequence: Synthetic oligonucleotide
  misc_feature 1..20: note = Target: ANGPTL4; (+) strand; PAM type: NRG; PAM sequence: GAG
  source 1..20: mol_type = other DNA
tccagcctgggagatagagt

SEQ ID NO: 12231 - DNA, 20 bp, synthetic construct
  misc_feature 1..20: note = Description of Artificial Sequence: Synthetic oligonucleotide
  misc_feature 1..20: note = Target: ANGPTL4; (+) strand; PAM type: NRG; PAM sequence: CAG
  source 1..20: mol_type = other DNA
ctgggagatagagtgagact

SEQ ID NO: 12232 - DNA, 20 bp, synthetic construct
  misc_feature 1..20: note = Description of Artificial Sequence: Synthetic oligonucleotide
  misc_feature 1..20: note = Target: ANGPTL4; (+) strand; PAM type: NRG; PAM sequence: AAG
  source 1..20: mol_type = other DNA
gagactcagtctcaaaaaaa

SEQ ID NO: 12233 - DNA, 20 bp, synthetic construct
  misc_feature 1..20: note = Description of Artificial Sequence: Synthetic oligonucleotide
  misc_feature 1..20: note = Target: ANGPTL4; (+) strand; PAM type: NRG; PAM sequence: TAG
  source 1..20: mol_type = other DNA
caaaaaaaaagaccaaaaat

SEQ ID NO: 12234 - DNA, 20 bp, synthetic construct
  misc_feature 1..20: note = Description of Artificial Sequence: Synthetic oligonucleotide
  misc_feature 1..20: note = Target: ANGPTL4; (+) strand; PAM type: NRG; PAM sequence: CAG
  source 1..20: mol_type = other DNA
aaaaaagaccaaaaattagc

SEQ ID NO: 12235 - DNA, 20 bp, synthetic construct
  misc_feature 1..20: note = Description of Artificial Sequence: Synthetic oligonucleotide
  misc_feature 1..20: note = Target: ANGPTL4; (+) strand; PAM type: NRG; PAM sequence: AGG
  source 1..20: mol_type = other DNA
aaaaagaccaaaaattagcc

SEQ ID NO: 12236 - DNA, 20 bp, synthetic construct
  misc_feature 1..20: note = Description of Artificial Sequence: Synthetic oligonucleotide
  misc_feature 1..20: note = Target: ANGPTL4; (+) strand; PAM type: NRG; PAM sequence: TGG
  source 1..20: mol_type = other DNA
gaccaaaaattagccaggtg

SEQ ID NO: 12237 - DNA, 20 bp, synthetic construct
  misc_feature 1..20: note = Description of Artificial Sequence: Synthetic oligonucleotide
  misc_feature 1..20: note = Target: ANGPTL4; (+) strand; PAM type: NRG; PAM sequence: TGG
  source 1..20: mol_type = other DNA
caaaaattagccaggtgtgg

SEQ ID NO: 12238 - DNA, 20 bp, synthetic construct
  misc_feature 1..20: note = Description of Artificial Sequence: Synthetic oligonucleotide
  misc_feature 1..20: note = Target: ANGPTL4; (+) strand; PAM type: NRG; PAM sequence: CAG
  source 1..20: mol_type = other DNA
aaattagccaggtgtggtgg

SEQ ID NO: 12239 - DNA, 20 bp, synthetic construct
  misc_feature 1..20: note = Description of Artificial Sequence: Synthetic oligonucleotide
  misc_feature 1..20: note = Target: ANGPTL4; (+) strand; PAM type: NRG; PAM sequence: AGG
  source 1..20: mol_type = other DNA
aattagccaggtgtggtggc

SEQ ID NO: 12240 - DNA, 20 bp, synthetic construct
  misc_feature 1..20: note = Description of Artificial Sequence: Synthetic oligonucleotide
  misc_feature 1..20: note = Target: ANGPTL4; (+) strand; PAM type: NRG; PAM sequence: CAG
  source 1..20: mol_type = other DNA
gtggcaggcgcctgtaatcc

SEQ ID NO: 12241 - DNA, 20 bp, synthetic construct
  misc_feature 1..20: note = Description of Artificial Sequence: Synthetic oligonucleotide
  misc_feature 1..20: note = Target: ANGPTL4; (+) strand; PAM type: NRG; PAM sequence: CGG
  source 1..20: mol_type = other DNA
cgcctgtaatcccagctact

SEQ ID NO: 12242 - DNA, 20 bp, synthetic construct
  misc_feature 1..20: note = Description of Artificial Sequence: Synthetic oligonucleotide
  misc_feature 1..20: note = Target: ANGPTL4; (+) strand; PAM type: NRG; PAM sequence: GGG
  source 1..20: mol_type = other DNA
gcctgtaatcccagctactc

SEQ ID NO: 12243 - DNA, 20 bp, synthetic construct
  misc_feature 1..20: note = Description of Artificial Sequence: Synthetic oligonucleotide
  misc_feature 1..20: note = Target: ANGPTL4; (+) strand; PAM type: NRG; PAM sequence: GAG
  source 1..20: mol_type = other DNA
ctgtaatcccagctactcgg

SEQ ID NO: 12244 - DNA, 20 bp, synthetic construct
  misc_feature 1..20: note = Description of Artificial Sequence: Synthetic oligonucleotide
  misc_feature 1..20: note = Target: ANGPTL4; (+) strand; PAM type: NRG; PAM sequence: AGG
  source 1..20: mol_type = other DNA
tgtaatcccagctactcggg

SEQ ID NO: 12245 - DNA, 20 bp, synthetic construct
  misc_feature 1..20: note = Description of Artificial Sequence: Synthetic oligonucleotide
  misc_feature 1..20: note = Target: ANGPTL4; (+) strand; PAM type: NRG; PAM sequence: GAG
  source 1..20: mol_type = other DNA
tcccagctactcgggaggct

SEQ ID NO: 12246 - DNA, 20 bp, synthetic construct
  misc_feature 1..20: note = Description of Artificial Sequence: Synthetic oligonucleotide
  misc_feature 1..20: note = Target: ANGPTL4; (+) strand; PAM type: NRG; PAM sequence: AGG
  source 1..20: mol_type = other DNA
cccagctactcgggaggctg

SEQ ID NO: 12247 - DNA, 20 bp, synthetic construct
  misc_feature 1..20: note = Description of Artificial Sequence: Synthetic oligonucleotide
  misc_feature 1..20: note = Target: ANGPTL4; (+) strand; PAM type: NRG; PAM sequence: GGG
  source 1..20: mol_type = other DNA
ccagctactcgggaggctga

SEQ ID NO: 12248 - DNA, 20 bp, synthetic construct
  misc_feature 1..20: note = Description of Artificial Sequence: Synthetic oligonucleotide
  misc_feature 1..20: note = Target: ANGPTL4; (+) strand; PAM type: NRG; PAM sequence: GAG
  source 1..20: mol_type = other DNA
agctactcgggaggctgagg

SEQ ID NO: 12249 - DNA, 20 bp, synthetic construct
  misc_feature 1..20: note = Description of Artificial Sequence: Synthetic oligonucleotide
  misc_feature 1..20: note = Target: ANGPTL4; (+) strand; PAM type: NRG; PAM sequence: AGG
  source 1..20: mol_type = other DNA
gctactcgggaggctgaggg

SEQ ID NO: 12250 - DNA, 20 bp, synthetic construct
  misc_feature 1..20: note = Description of Artificial Sequence: Synthetic oligonucleotide
  misc_feature 1..20: note = Target: ANGPTL4; (+) strand; PAM type: NRG; PAM sequence: GAG
  source 1..20: mol_type = other DNA
tactcgggaggctgagggag

SEQ ID NO: 12251 - DNA, 20 bp, synthetic construct
  misc_feature 1..20: note = Description of Artificial Sequence: Synthetic oligonucleotide
  misc_feature 1..20: note = Target: ANGPTL4; (+) strand; PAM type: NRG; PAM sequence: GAG
  source 1..20: mol_type = other DNA
gaggagaatcacttaaacct

SEQ ID NO: 12252 - DNA, 20 bp, synthetic construct
  misc_feature 1..20: note = Description of Artificial Sequence: Synthetic oligonucleotide
  misc_feature 1..20: note = Target: ANGPTL4; (+) strand; PAM type: NRG; PAM sequence: GAG
  source 1..20: mol_type = other DNA
ggagaatcacttaaacctga

SEQ ID NO: 12253 - DNA, 20 bp, synthetic construct
  misc_feature 1..20: note = Description of Artificial Sequence: Synthetic oligonucleotide
  misc_feature 1..20: note = Target: ANGPTL4; (+) strand; PAM type: NRG; PAM sequence: CGG
  source 1..20: mol_type = other DNA
aatcacttaaacctgagaga

SEQ ID NO: 12254 - DNA, 20 bp, synthetic construct
  misc_feature 1..20: note = Description of Artificial Sequence: Synthetic oligonucleotide
  misc_feature 1..20: note = Target: ANGPTL4; (+) strand; PAM type: NRG; PAM sequence: GAG
  source 1..20: mol_type = other DNA
tcacttaaacctgagagacg

SEQ ID NO: 12255 - DNA, 20 bp, synthetic construct
  misc_feature 1..20: note = Description of Artificial Sequence: Synthetic oligonucleotide
  misc_feature 1..20: note = Target: ANGPTL4; (+) strand; PAM type: NRG; PAM sequence: AGG
  source 1..20: mol_type = other DNA
cacttaaacctgagagacgg

SEQ ID NO: 12256 - DNA, 20 bp, synthetic construct
  misc_feature 1..20: note = Description of Artificial Sequence: Synthetic oligonucleotide
  misc_feature 1..20: note = Target: ANGPTL4; (+) strand; PAM type: NRG; PAM sequence: CAG
  source 1..20: mol_type = other DNA
aacctgagagacggaggttg

SEQ ID NO: 12257 - DNA, 20 bp, synthetic construct
  misc_feature 1..20: note = Description of Artificial Sequence: Synthetic oligonucleotide
  misc_feature 1..20: note = Target: ANGPTL4; (+) strand; PAM type: NRG; PAM sequence: GAG
  source 1..20: mol_type = other DNA
tgagagacggaggttgcagt

SEQ ID NO: 12258 - DNA, 20 bp, synthetic construct
  misc_feature 1..20: note = Description of Artificial Sequence: Synthetic oligonucleotide
  misc_feature 1..20: note = Target: ANGPTL4; (+) strand; PAM type: NRG; PAM sequence: GAG
  source 1..20: mol_type = other DNA
gacggaggttgcagtgagct

SEQ ID NO: 12259 - DNA, 20 bp, synthetic construct
  misc_feature 1..20: note = Description of Artificial Sequence: Synthetic oligonucleotide
  misc_feature 1..20: note = Target: ANGPTL4; (+) strand; PAM type: NRG; PAM sequence: CAG
  source 1..20: mol_type = other DNA
gagatcgcaccactgcactc

SEQ ID NO: 12260 - DNA, 20 bp, synthetic construct
  misc_feature 1..20: note = Description of Artificial Sequence: Synthetic oligonucleotide
  misc_feature 1..20: note = Target: ANGPTL4; (+) strand; PAM type: NRG; PAM sequence: TGG
  source 1..20: mol_type = other DNA
cgcaccactgcactccagcc

SEQ ID NO: 12261 - DNA, 20 bp, synthetic construct
  misc_feature 1..20: note = Description of Artificial Sequence: Synthetic oligonucleotide
  misc_feature 1..20: note = Target: ANGPTL4; (+) strand; PAM type: NRG; PAM sequence: GGG
  source 1..20: mol_type = other DNA
gcaccactgcactccagcct

SEQ ID NO: 12262 - DNA, 20 bp, synthetic construct
  misc_feature 1..20: note = Description of Artificial Sequence: Synthetic oligonucleotide
  misc_feature 1..20: note = Target: ANGPTL4; (+) strand; PAM type: NRG; PAM sequence: CAG
  source 1..20: mol_type = other DNA
ctgcactccagcctgggtga

SEQ ID NO: 12263 - DNA, 20 bp, synthetic construct
  misc_feature 1..20: note = Description of Artificial Sequence: Synthetic oligonucleotide
  misc_feature 1..20: note = Target: ANGPTL4; (+) strand; PAM type: NRG; PAM sequence: GAG
  source 1..20: mol_type = other DNA
gcactccagcctgggtgaca

SEQ ID NO: 12264 - DNA, 20 bp, synthetic construct
  misc_feature 1..20: note = Description of Artificial Sequence: Synthetic oligonucleotide
  misc_feature 1..20: note = Target: ANGPTL4; (+) strand; PAM type: NRG; PAM sequence: AAG
  source 1..20: mol_type = other DNA
tccagcctgggtgacagagt

SEQ ID NO: 12265 - DNA, 20 bp, synthetic construct
  misc_feature 1..20: note = Description of Artificial Sequence: Synthetic oligonucleotide
  misc_feature 1..20: note = Target: ANGPTL4; (+) strand; PAM type: NRG; PAM sequence: AAG
  source 1..20: mol_type = other DNA
actcaatctcaaaaaaaaaa

SEQ ID NO: 12266 - DNA, 20 bp, synthetic construct
  misc_feature 1..20: note = Description of Artificial Sequence: Synthetic oligonucleotide
  misc_feature 1..20: note = Target: ANGPTL4; (+) strand; PAM type: NRG; PAM sequence: AAG
  source 1..20: mol_type = other DNA
atctcaaaaaaaaaaaagtc

SEQ ID NO: 12267 - DNA, 20 bp, synthetic construct
  misc_feature 1..20: note = Description of Artificial Sequence: Synthetic oligonucleotide
  misc_feature 1..20: note = Target: ANGPTL4; (+) strand; PAM type: NRG; PAM sequence: AAG
  source 1..20: mol_type = other DNA
aaaaaaaaaagtcaagtcca

SEQ ID NO: 12268 - DNA, 20 bp, synthetic construct
  misc_feature 1..20: note = Description of Artificial Sequence: Synthetic oligonucleotide
  misc_feature 1..20: note = Target: ANGPTL4; (+) strand; PAM type: NRG; PAM sequence: CAG
  source 1..20: mol_type = other DNA
aaaaagtcaagtccaaagcc

SEQ ID NO: 12269 - DNA, 20 bp, synthetic construct
  misc_feature 1..20: note = Description of Artificial Sequence: Synthetic oligonucleotide
  misc_feature 1..20: note = Target: ANGPTL4; (+) strand; PAM type: NRG; PAM sequence: TGG
  source 1..20: mol_type = other DNA
gtcaagtccaaagcccagcc

SEQ ID NO: 12270 - DNA, 20 bp, synthetic construct
  misc_feature 1..20: note = Description of Artificial Sequence: Synthetic oligonucleotide
  misc_feature 1..20: note = Target: ANGPTL4; (+) strand; PAM type: NRG; PAM sequence: CAG
  source 1..20: mol_type = other DNA
accctatccctatctccttt

SEQ ID NO: 12271 - DNA, 20 bp, synthetic construct
  misc_feature 1..20: note = Description of Artificial Sequence: Synthetic oligonucleotide
  misc_feature 1..20: note = Target: ANGPTL4; (+) strand; PAM type: NRG; PAM sequence: CGG
  source 1..20: mol_type = other DNA
ctatctcctttcagccccat

SEQ ID NO: 12272 - DNA, 20 bp, synthetic construct
  misc_feature 1..20: note = Description of Artificial Sequence: Synthetic oligonucleotide
  misc_feature 1..20: note = Target: ANGPTL4; (+) strand; PAM type: NRG; PAM sequence: TGG
  source 1..20: mol_type = other DNA
tctcctttcagccccatcgg

SEQ ID NO: 12273 - DNA, 20 bp, synthetic construct
  misc_feature 1..20: note = Description of Artificial Sequence: Synthetic oligonucleotide
  misc_feature 1..20: note = Target: ANGPTL4; (+) strand; PAM type: NRG; PAM sequence: AAG
  source 1..20: mol_type = other DNA
tcagccccatcggtggctca

SEQ ID NO: 12274 - DNA, 20 bp, synthetic construct
  misc_feature 1..20: note = Description of Artificial Sequence: Synthetic oligonucleotide
  misc_feature 1..20: note = Target: ANGPTL4; (+) strand; PAM type: NRG; PAM sequence: CGG
  source 1..20: mol_type = other DNA
tgttccctctcccctgaccc

SEQ ID NO: 12275 - DNA, 20 bp, synthetic construct
  misc_feature 1..20: note = Description of Artificial Sequence: Synthetic oligonucleotide
  misc_feature 1..20: note = Target: ANGPTL4; (+) strand; PAM type: NRG; PAM sequence: CAG
  source 1..20: mol_type = other DNA
tccctctcccctgaccccgg

SEQ ID NO: 12276 - DNA, 20 bp, synthetic construct
  misc_feature 1..20: note = Description of Artificial Sequence: Synthetic oligonucleotide
  misc_feature 1..20: note = Target: ANGPTL4; (+) strand; PAM type: NRG; PAM sequence: AGG
  source 1..20: mol_type = other DNA
ccctctcccctgaccccggc

SEQ ID NO: 12277 - DNA, 20 bp, synthetic construct
  misc_feature 1..20: note = Description of Artificial Sequence: Synthetic oligonucleotide
  misc_feature 1..20: note = Target: ANGPTL4; (+) strand; PAM type: NRG; PAM sequence: GAG
  source 1..20: mol_type = other DNA
ctctcccctgaccccggcag

SEQ ID NO: 12278 - DNA, 20 bp, synthetic construct
  misc_feature 1..20: note = Description of Artificial Sequence: Synthetic oligonucleotide
  misc_feature 1..20: note = Target: ANGPTL4; (+) strand; PAM type: NRG; PAM sequence: AGG
  source 1..20: mol_type = other DNA
tctcccctgaccccggcagg

SEQ ID NO: 12279 - DNA, 20 bp, synthetic construct
  misc_feature 1..20: note = Description of Artificial Sequence: Synthetic oligonucleotide
  misc_feature 1..20: note = Target: ANGPTL4; (+) strand; PAM type: NRG; PAM sequence: TGG
  source 1..20: mol_type = other DNA
ccctgaccccggcaggaggc

SEQ ID NO: 12280 - DNA, 20 bp, synthetic construct
  misc_feature 1..20: note = Description of Artificial Sequence: Synthetic oligonucleotide
  misc_feature 1..20: note = Target: ANGPTL4; (+) strand; PAM type: NRG; PAM sequence: TGG
  source 1..20: mol_type = other DNA
tgaccccggcaggaggctgg

SEQ ID NO: 12281 - DNA, 20 bp, synthetic construct
  misc_feature 1..20: note = Description of Artificial Sequence: Synthetic oligonucleotide
  misc_feature 1..20: note = Target: ANGPTL4; (+) strand; PAM type: NRG; PAM sequence: TGG
  source 1..20: mol_type = other DNA
ccggcaggaggctggtggtt

SEQ ID NO: 12282 - DNA, 20 bp, synthetic construct
  misc_feature 1..20: note = Description of Artificial Sequence: Synthetic oligonucleotide
  misc_feature 1..20: note = Target: ANGPTL4; (+) strand; PAM type: NRG; PAM sequence: CAG
  source 1..20: mol_type = other DNA
ggctggtggtttggcacctg

SEQ ID NO: 12283 - DNA, 20 bp, synthetic construct
  misc_feature 1..20: note = Description of Artificial Sequence: Synthetic oligonucleotide
  misc_feature 1..20: note = Target: ANGPTL4; (+) strand; PAM type: NRG; PAM sequence: CGG
  source 1..20: mol_type = other DNA
tgcagccattccaacctcaa

SEQ ID NO: 12284 - DNA, 20 bp, synthetic construct
  misc_feature 1..20: note = Description of Artificial Sequence: Synthetic oligonucleotide
  misc_feature 1..20: note = Target: ANGPTL4; (+) strand; PAM type: NRG; PAM sequence: CAG
  source 1..20: mol_type = other DNA
gccattccaacctcaacggc

SEQ ID NO: 12285 - DNA, 20 bp, synthetic construct
  misc_feature 1..20: note = Description of Artificial Sequence: Synthetic oligonucleotide
  misc_feature 1..20: note = Target: ANGPTL4; (+) strand; PAM type: NRG; PAM sequence: CAG
  source 1..20: mol_type = other DNA
agtacttccgctccatccca

SEQ ID NO: 12286 - DNA, 20 bp, synthetic construct
  misc_feature 1..20: note = Description of Artificial Sequence: Synthetic oligonucleotide
  misc_feature 1..20: note = Target: ANGPTL4; (+) strand; PAM type: NRG; PAM sequence: CAG
  source 1..20: mol_type = other DNA
acttccgctccatcccacag

SEQ ID NO: 12287 - DNA, 20 bp, synthetic construct
  misc_feature 1..20: note = Description of Artificial Sequence: Synthetic oligonucleotide
  misc_feature 1..20: note = Target: ANGPTL4; (+) strand; PAM type: NRG; PAM sequence: CGG
  source 1..20: mol_type = other DNA
tccgctccatcccacagcag

SEQ ID NO: 12288 - DNA, 20 bp, synthetic construct
  misc_feature 1..20: note = Description of Artificial Sequence: Synthetic oligonucleotide
  misc_feature 1..20: note = Target: ANGPTL4; (+) strand; PAM type: NRG; PAM sequence: CAG
  source 1..20: mol_type = other DNA
gctccatcccacagcagcgg

SEQ ID NO: 12289 - DNA, 20 bp, synthetic construct
  misc_feature 1..20: note = Description of Artificial Sequence: Synthetic oligonucleotide
  misc_feature 1..20: note = Target: ANGPTL4; (+) strand; PAM type: NRG; PAM sequence: AAG
  source 1..20: mol_type = other DNA
ccatcccacagcagcggcag

SEQ ID NO: 12290 - DNA, 20 bp, synthetic construct
  misc_feature 1..20: note = Description of Artificial Sequence: Synthetic oligonucleotide
  misc_feature 1..20: note = Target: ANGPTL4; (+) strand; PAM type: NRG; PAM sequence: AAG
  source 1..20: mol_type = other DNA
cacagcagcggcagaagctt

SEQ ID NO: 12291 - DNA, 20 bp, synthetic construct
  misc_feature 1..20: note = Description of Artificial Sequence: Synthetic oligonucleotide
  misc_feature 1..20: note = Target: ANGPTL4; (+) strand; PAM type: NRG; PAM sequence: AAG
  source 1..20: mol_type = other DNA
agcagcggcagaagcttaag

SEQ ID NO: 12292 - DNA, 20 bp, synthetic construct
  misc_feature 1..20: note = Description of Artificial Sequence: Synthetic oligonucleotide
  misc_feature 1..20: note = Target: ANGPTL4; (+) strand; PAM type: NRG; PAM sequence: AGG
  source 1..20: mol_type = other DNA
gcagcggcagaagcttaaga

SEQ ID NO: 12293 - DNA, 20 bp, synthetic construct
  misc_feature 1..20: note = Description of Artificial Sequence: Synthetic oligonucleotide
  misc_feature 1..20: note = Target: ANGPTL4; (+) strand; PAM type: NRG; PAM sequence: GGG
  source 1..20: mol_type = other DNA
cagcggcagaagcttaagaa

SEQ ID NO: 12294 - DNA, 20 bp, synthetic construct
  misc_feature 1..20: note = Description of Artificial Sequence: Synthetic oligonucleotide
  misc_feature 1..20: note = Target: ANGPTL4; (+) strand; PAM type: NRG; PAM sequence: TGG
  source 1..20: mol_type = other DNA
agcttaagaagggaatcttc

SEQ ID NO: 12295 - DNA, 20 bp, synthetic construct
  misc_feature 1..20: note = Description of Artificial Sequence: Synthetic oligonucleotide
  misc_feature 1..20: note = Target: ANGPTL4; (+) strand; PAM type: NRG; PAM sequence: AAG
  source 1..20: mol_type = other DNA
ttaagaagggaatcttctgg

SEQ ID NO: 12296 - DNA, 20 bp, synthetic construct
  misc_feature 1..20: note = Description of Artificial Sequence: Synthetic oligonucleotide
  misc_feature 1..20: note = Target: ANGPTL4; (+) strand; PAM type: NRG; PAM sequence: TGG
  source 1..20: mol_type = other DNA
agggaatcttctggaagacc

SEQ ID NO: 12297 - DNA, 20 bp, synthetic construct
  misc_feature 1..20: note = Description of Artificial Sequence: Synthetic oligonucleotide
  misc_feature 1..20: note = Target: ANGPTL4; (+) strand; PAM type: NRG; PAM sequence: CGG
  source 1..20: mol_type = other DNA
gaatcttctggaagacctgg

SEQ ID NO: 12298 - DNA, 20 bp, synthetic construct
  misc_feature 1..20: note = Description of Artificial Sequence: Synthetic oligonucleotide
  misc_feature 1..20: note = Target: ANGPTL4; (+) strand; PAM type: NRG; PAM sequence: GGG
  source 1..20: mol_type = other DNA
aatcttctggaagacctggc

SEQ ID NO: 12299 - DNA, 20 bp, synthetic construct
  misc_feature 1..20: note = Description of Artificial Sequence: Synthetic oligonucleotide
  misc_feature 1..20: note = Target: ANGPTL4; (+) strand; PAM type: NRG; PAM sequence: GGG
  source 1..20: mol_type = other DNA
atcttctggaagacctggcg

SEQ ID NO: 12300 - DNA, 20 bp, synthetic construct
  misc_feature 1..20: note = Description of Artificial Sequence: Synthetic oligonucleotide
  misc_feature 1..20: note = Target: ANGPTL4; (+) strand; PAM type: NRG; PAM sequence: CAG
  source 1..20: mol_type = other DNA
ggggccgctactacccgctg

SEQ ID NO: 12301 - DNA, 20 bp, synthetic construct
  misc_feature 1..20: note = Description of Artificial Sequence: Synthetic oligonucleotide
  misc_feature 1..20: note = Target: ANGPTL4; (+) strand; PAM type: NRG; PAM sequence: AGG
  source 1..20: mol_type = other DNA
gggccgctactacccgctgc

SEQ ID NO: 12302 - DNA, 20 bp, synthetic construct
  misc_feature 1..20: note = Description of Artificial Sequence: Synthetic oligonucleotide
  misc_feature 1..20: note = Target: ANGPTL4; (+) strand; PAM type: NRG; PAM sequence: CAG
  source 1..20: mol_type = other DNA
aggccaccaccatgttgatc

SEQ ID NO: 12303 - DNA, 20 bp, synthetic construct
  misc_feature 1..20: note = Description of Artificial Sequence: Synthetic oligonucleotide
  misc_feature 1..20: note = Target: ANGPTL4; (+) strand; PAM type: NRG; PAM sequence: TGG
  source 1..20: mol_type = other DNA
caccatgttgatccagccca

SEQ ID NO: 12304 - DNA, 20 bp, synthetic construct
  misc_feature 1..20: note = Description of Artificial Sequence: Synthetic oligonucleotide
  misc_feature 1..20: note = Target: ANGPTL4; (+) strand; PAM type: NRG; PAM sequence: CAG
  source 1..20: mol_type = other DNA
catgttgatccagcccatgg

SEQ ID NO: 12305 - DNA, 20 bp, synthetic construct
  misc_feature 1..20: note = Description of Artificial Sequence: Synthetic oligonucleotide
  misc_feature 1..20: note = Target: ANGPTL4; (+) strand; PAM type: NRG; PAM sequence: CAG
  source 1..20: mol_type = other DNA
gttgatccagcccatggcag

SEQ ID NO: 12306 - DNA, 20 bp, synthetic construct
  misc_feature 1..20: note = Description of Artificial Sequence: Synthetic oligonucleotide
  misc_feature 1..20: note = Target: ANGPTL4; (+) strand; PAM type: NRG; PAM sequence: GAG
  source 1..20: mol_type = other DNA
tgatccagcccatggcagca

SEQ ID NO: 12307 - DNA, 20 bp, synthetic construct
  misc_feature 1..20: note = Description of Artificial Sequence: Synthetic oligonucleotide
  misc_feature 1..20: note = Target: ANGPTL4; (+) strand; PAM type: NRG; PAM sequence: AGG
  source 1..20: mol_type = other DNA
gatccagcccatggcagcag

SEQ ID NO: 12308 - DNA, 20 bp, synthetic construct
  misc_feature 1..20: note = Description of Artificial Sequence: Synthetic oligonucleotide
  misc_feature 1..20: note = Target: ANGPTL4; (+) strand; PAM type: NRG; PAM sequence: CAG
  source 1..20: mol_type = other DNA
ccagcccatggcagcagagg

SEQ ID NO: 12309 - DNA, 20 bp, synthetic construct
  misc_feature 1..20: note = Description of Artificial Sequence: Synthetic oligonucleotide
  misc_feature 1..20: note = Target: ANGPTL4; (+) strand; PAM type: NRG; PAM sequence: TAG
  source 1..20: mol_type = other DNA
tggcagcagaggcagcctcc

SEQ ID NO: 12310 - DNA, 20 bp, synthetic construct
  misc_feature 1..20: note = Description of Artificial Sequence: Synthetic oligonucleotide
  misc_feature 1..20: note = Target: ANGPTL4; (+) strand; PAM type: NRG; PAM sequence: TGG
  source 1..20: mol_type = other DNA
gaggcagcctcctagcgtcc

SEQ ID NO: 12311 - DNA, 20 bp, synthetic construct
  misc_feature 1..20: note = Description of Artificial Sequence: Synthetic oligonucleotide
  misc_feature 1..20: note = Target: ANGPTL4; (+) strand; PAM type: NRG; PAM sequence: TGG
  source 1..20: mol_type = other DNA
cagcctcctagcgtcctggc

SEQ ID NO: 12312 - DNA, 20 bp, synthetic construct
  misc_feature 1..20: note = Description of Artificial Sequence: Synthetic oligonucleotide
  misc_feature 1..20: note = Target: ANGPTL4; (+) strand; PAM type: NRG; PAM sequence: GGG
  source 1..20: mol_type = other DNA
agcctcctagcgtcctggct

SEQ ID NO: 12313 - DNA, 20 bp, synthetic construct
  misc_feature 1..20: note = Description of Artificial Sequence: Synthetic oligonucleotide
  misc_feature 1..20: note = Target: ANGPTL4; (+) strand; PAM type: NRG; PAM sequence: TGG
  source 1..20: mol_type = other DNA
cctagcgtcctggctgggcc

SEQ ID NO: 12314 - DNA, 20 bp, synthetic construct
  misc_feature 1..20: note = Description of Artificial Sequence: Synthetic oligonucleotide
  misc_feature 1..20: note = Target: ANGPTL4; (+) strand; PAM type: NRG; PAM sequence: CAG
  source 1..20: mol_type = other DNA
gtcctggctgggcctggtcc

SEQ ID NO: 12315 - DNA, 20 bp, synthetic construct
  misc_feature 1..20: note = Description of Artificial Sequence: Synthetic oligonucleotide
  misc_feature 1..20: note = Target: ANGPTL4; (+) strand; PAM type: NRG; PAM sequence: AGG
  source 1..20: mol_type = other DNA
tcctggctgggcctggtccc

SEQ ID NO: 12316 - DNA, 20 bp, synthetic construct
  misc_feature 1..20: note = Description of Artificial Sequence: Synthetic oligonucleotide
  misc_feature 1..20: note = Target: ANGPTL4; (+) strand; PAM type: NRG; PAM sequence: AAG
  source 1..20: mol_type = other DNA
gcctggtcccaggcccacga

SEQ ID NO: 12317 - DNA, 20 bp, synthetic construct
  misc_feature 1..20: note = Description of Artificial Sequence: Synthetic oligonucleotide
  misc_feature 1..20: note = Target: ANGPTL4; (+) strand; PAM type: NRG; PAM sequence: CGG
  source 1..20: mol_type = other DNA
ggtcccaggcccacgaaaga

SEQ ID NO: 12318 - DNA, 20 bp, synthetic construct
  misc_feature 1..20: note = Description of Artificial Sequence: Synthetic oligonucleotide
  misc_feature 1..20: note = Target: ANGPTL4; (+) strand; PAM type: NRG; PAM sequence: TGG
  source 1..20: mol_type = other DNA
ccacgaaagacggtgactct

SEQ ID NO: 12319 - DNA, 20 bp, synthetic construct
  misc_feature 1..20: note = Description of Artificial Sequence: Synthetic oligonucleotide
  misc_feature 1..20: note = Target: ANGPTL4; (+) strand; PAM type: NRG; PAM sequence: GAG
  source 1..20: mol_type = other DNA
ggtgactcttggctctgccc

SEQ ID NO: 12320 - DNA, 20 bp, synthetic construct
  misc_feature 1..20: note = Description of Artificial Sequence: Synthetic oligonucleotide
  misc_feature 1..20: note = Target: ANGPTL4; (+) strand; PAM type: NRG; PAM sequence: AGG
  source 1..20: mol_type = other DNA
gtgactcttggctctgcccg

SEQ ID NO: 12321 - DNA, 20 bp, synthetic construct
  misc_feature 1..20: note = Description of Artificial Sequence: Synthetic oligonucleotide
  misc_feature 1..20: note = Target: ANGPTL4; (+) strand; PAM type: NRG; PAM sequence: TGG
  source 1..20: mol_type = other DNA
cttggctctgcccgaggatg

SEQ ID NO: 12322 - DNA, 20 bp, synthetic construct
  misc_feature 1..20: note = Description of Artificial Sequence: Synthetic oligonucleotide
  misc_feature 1..20: note = Target: ANGPTL4; (+) strand; PAM type: NRG; PAM sequence: TGG
  source 1..20: mol_type = other DNA
ggatgtggccgttccctgcc

SEQ ID NO: 12323 - DNA, 20 bp, synthetic construct
  misc_feature 1..20: note = Description of Artificial Sequence: Synthetic oligonucleotide
  misc_feature 1..20: note = Target: ANGPTL4; (+) strand; PAM type: NRG; PAM sequence: GGG
  source 1..20: mol_type = other DNA
gatgtggccgttccctgcct

SEQ ID NO: 12324 - DNA, 20 bp, synthetic construct
  misc_feature 1..20: note = Description of Artificial Sequence: Synthetic oligonucleotide
  misc_feature 1..20: note = Target: ANGPTL4; (+) strand; PAM type: NRG; PAM sequence: CAG
  source 1..20: mol_type = other DNA
gtggccgttccctgcctggg

SEQ ID NO: 12325 - DNA, 20 bp, synthetic construct
  misc_feature 1..20: note = Description of Artificial Sequence: Synthetic oligonucleotide
  misc_feature 1..20: note = Target: ANGPTL4; (+) strand; PAM type: NRG; PAM sequence: AGG
  source 1..20: mol_type = other DNA
tggccgttccctgcctgggc

SEQ ID NO: 12326 - DNA, 20 bp, synthetic construct
  misc_feature 1..20: note = Description of Artificial Sequence: Synthetic oligonucleotide
  misc_feature 1..20: note = Target: ANGPTL4; (+) strand; PAM type: NRG; PAM sequence: GGG
  source 1..20: mol_type = other DNA
ggccgttccctgcctgggca

SEQ ID NO: 12327 - DNA, 20 bp, synthetic construct
  misc_feature 1..20: note = Description of Artificial Sequence: Synthetic oligonucleotide
  misc_feature 1..20: note = Target: ANGPTL4; (+) strand; PAM type: NRG; PAM sequence: GGG
  source 1..20: mol_type = other DNA
gccgttccctgcctgggcag

SEQ ID NO: 12328 - DNA, 20 bp, synthetic construct
  misc_feature 1..20: note = Description of Artificial Sequence: Synthetic oligonucleotide
  misc_feature 1..20: note = Target: ANGPTL4; (+) strand; PAM type: NRG; PAM sequence: AAG
  source 1..20: mol_type = other DNA
cctgcctgggcaggggctcc

SEQ ID NO: 12329 - DNA, 20 bp, synthetic construct
  misc_feature 1..20: note = Description of Artificial Sequence: Synthetic oligonucleotide
  misc_feature 1..20: note = Target: ANGPTL4; (+) strand; PAM type: NRG; PAM sequence: AGG
  source 1..20: mol_type = other DNA
ctgcctgggcaggggctcca

SEQ ID NO: 12330 - DNA, 20 bp, synthetic construct
  misc_feature 1..20: note = Description of Artificial Sequence: Synthetic oligonucleotide
  misc_feature 1..20: note = Target: ANGPTL4; (+) strand; PAM type: NRG; PAM sequence: GAG
  source 1..20: mol_type = other DNA
gcctgggcaggggctccaag

SEQ ID NO: 12331 - DNA, 20 bp, synthetic construct
  misc_feature 1..20: note = Description of Artificial Sequence: Synthetic oligonucleotide
  misc_feature 1..20: note = Target: ANGPTL4; (+) strand; PAM type: NRG; PAM sequence: AGG
  source 1..20: mol_type = other DNA
cctgggcaggggctccaagg

SEQ ID NO: 12332 - DNA, 20 bp, synthetic construct
  misc_feature 1..20: note = Description of Artificial Sequence: Synthetic oligonucleotide
  misc_feature 1..20: note = Target: ANGPTL4; (+) strand; PAM type: NRG; PAM sequence: GGG
  source 1..20: mol_type = other DNA
ctgggcaggggctccaagga

SEQ ID NO: 12333 - DNA, 20 bp, synthetic construct
  misc_feature 1..20: note = Description of Artificial Sequence: Synthetic oligonucleotide
  misc_feature 1..20: note = Target: ANGPTL4; (+) strand; PAM type: NRG; PAM sequence: GGG
  source 1..20: mol_type = other DNA
tgggcaggggctccaaggag

SEQ ID NO: 12334 - DNA, 20 bp, synthetic construct
  misc_feature 1..20: note = Description of Artificial Sequence: Synthetic oligonucleotide
  misc_feature 1..20: note = Target: ANGPTL4; (+) strand; PAM type: NRG; PAM sequence: TGG
  source 1..20: mol_type = other DNA
ggctccaaggaggggccatc

SEQ ID NO: 12335 - DNA, 20 bp, synthetic construct
  misc_feature 1..20: note = Description of Artificial Sequence: Synthetic oligonucleotide
  misc_feature 1..20: note = Target: ANGPTL4; (+) strand; PAM type: NRG; PAM sequence: TGG
  source 1..20: mol_type = other DNA
aggggccatctggaaacttg

SEQ ID NO: 12336 - DNA, 20 bp, synthetic construct
  misc_feature 1..20: note = Description of Artificial Sequence: Synthetic oligonucleotide
  misc_feature 1..20: note = Target: ANGPTL4; (+) strand; PAM type: NRG; PAM sequence: CAG
  source 1..20: mol_type = other DNA
gccatctggaaacttgtgga

SEQ ID NO: 12337 - DNA, 20 bp, synthetic construct
  misc_feature 1..20: note = Description of Artificial Sequence: Synthetic oligonucleotide
  misc_feature 1..20: note = Target: ANGPTL4; (+) strand; PAM type: NRG; PAM sequence: GAG
  source 1..20: mol_type = other DNA
catctggaaacttgtggaca

SEQ ID NO: 12338 - DNA, 20 bp, synthetic construct
  misc_feature 1..20: note = Description of Artificial Sequence: Synthetic oligonucleotide
  misc_feature 1..20: note = Target: ANGPTL4; (+) strand; PAM type: NRG; PAM sequence: AAG
  source 1..20: mol_type = other DNA
ctggaaacttgtggacagag

SEQ ID NO: 12339 - DNA, 20 bp, synthetic construct
  misc_feature 1..20: note = Description of Artificial Sequence: Synthetic oligonucleotide
  misc_feature 1..20: note = Target: ANGPTL4; (+) strand; PAM type: NRG; PAM sequence: AAG
  source 1..20: mol_type = other DNA
gaaacttgtggacagagaag

SEQ ID NO: 12340 - DNA, 20 bp, synthetic construct
  misc_feature 1..20: note = Description of Artificial Sequence: Synthetic oligonucleotide
  misc_feature 1..20: note = Target: ANGPTL4; (+) strand; PAM type: NRG; PAM sequence: TGG
  source 1..20: mol_type = other DNA
acagagaagaagaccacgac

SEQ ID NO: 12341 - DNA, 20 bp, synthetic construct
  misc_feature 1..20: note = Description of Artificial Sequence: Synthetic oligonucleotide
  misc_feature 1..20: note = Target: ANGPTL4; (+) strand; PAM type: NRG; PAM sequence: GAG
  source 1..20: mol_type = other DNA
agagaagaagaccacgactg

SEQ ID NO: 12342 - DNA, 20 bp, synthetic construct
  misc_feature 1..20: note = Description of Artificial Sequence: Synthetic oligonucleotide
  misc_feature 1..20: note = Target: ANGPTL4; (+) strand; PAM type: NRG; PAM sequence: AAG
  source 1..20: mol_type = other DNA
gaagaagaccacgactggag

SEQ ID NO: 12343 - DNA, 20 bp, synthetic construct
  misc_feature 1..20: note = Description of Artificial Sequence: Synthetic oligonucleotide
  misc_feature 1..20: note = Target: ANGPTL4; (+) strand; PAM type: NRG; PAM sequence: GAG
  source 1..20: mol_type = other DNA
actggagaagccccctttct

SEQ ID NO: 12344 - DNA, 20 bp, synthetic construct
  misc_feature 1..20: note = Description of Artificial Sequence: Synthetic oligonucleotide
  misc_feature 1..20: note = Target: ANGPTL4; (+) strand; PAM type: NRG; PAM sequence: CAG
  source 1..20: mol_type = other DNA
agaagccccctttctgagtg

SEQ ID NO: 12345 - DNA, 20 bp, synthetic construct
  misc_feature 1..20: note = Description of Artificial Sequence: Synthetic oligonucleotide
  misc_feature 1..20: note = Target: ANGPTL4; (+) strand; PAM type: NRG; PAM sequence: AGG
  source 1..20: mol_type = other DNA
gaagccccctttctgagtgc

SEQ ID NO: 12346 - DNA, 20 bp, synthetic construct
  misc_feature 1..20: note = Description of Artificial Sequence: Synthetic oligonucleotide
  misc_feature 1..20: note = Target: ANGPTL4; (+) strand; PAM type: NRG; PAM sequence: GGG
  source 1..20: mol_type = other DNA
aagccccctttctgagtgca

SEQ ID NO: 12347 - DNA, 20 bp, synthetic construct
  misc_feature 1..20: note = Description of Artificial Sequence: Synthetic oligonucleotide
  misc_feature 1..20: note = Target: ANGPTL4; (+) strand; PAM type: NRG; PAM sequence: GGG
  source 1..20: mol_type = other DNA
agccccctttctgagtgcag

SEQ ID NO: 12348 - DNA, 20 bp, synthetic construct
  misc_feature 1..20: note = Description of Artificial Sequence: Synthetic oligonucleotide
  misc_feature 1..20: note = Target: ANGPTL4; (+) strand; PAM type: NRG; PAM sequence: GGG
  source 1..20: mol_type = other DNA
gccccctttctgagtgcagg

SEQ ID NO: 12349 - DNA, 20 bp, synthetic construct
  misc_feature 1..20: note = Description of Artificial Sequence: Synthetic oligonucleotide
  misc_feature 1..20: note = Target: ANGPTL4; (+) strand; PAM type: NRG; PAM sequence: GGG
  source 1..20: mol_type = other DNA
ccccctttctgagtgcaggg

SEQ ID NO: 12350 - DNA, 20 bp, synthetic construct
  misc_feature 1..20: note = Description of Artificial Sequence: Synthetic oligonucleotide
  misc_feature 1..20: note = Target: ANGPTL4; (+) strand; PAM type: NRG; PAM sequence: GAG
  source 1..20: mol_type = other DNA
ggctgcatgcgttgcctcct

SEQ ID NO: 12351 - DNA, 20 bp, synthetic construct
  misc_feature 1..20: note = Description of Artificial Sequence: Synthetic oligonucleotide
  misc_feature 1..20: note = Target: ANGPTL4; (+) strand; PAM type: NRG; PAM sequence: GAG
  source 1..20: mol_type = other DNA
atgcgttgcctcctgagatc

SEQ ID NO: 12352 - DNA, 20 bp, synthetic construct
  misc_feature 1..20: note = Description of Artificial Sequence: Synthetic oligonucleotide
  misc_feature 1..20: note = Target: ANGPTL4; (+) strand; PAM type: NRG; PAM sequence: AGG
  source 1..20: mol_type = other DNA
tgcgttgcctcctgagatcg

SEQ ID NO: 12353 - DNA, 20 bp, synthetic construct
  misc_feature 1..20: note = Description of Artificial Sequence: Synthetic oligonucleotide
  misc_feature 1..20: note = Target: ANGPTL4; (+) strand; PAM type: NRG; PAM sequence: CAG
  source 1..20: mol_type = other DNA
gcctcctgagatcgaggctg

SEQ ID NO: 12354 - DNA, 20 bp, synthetic construct
  misc_feature 1..20: note = Description of Artificial Sequence: Synthetic oligonucleotide
  misc_feature 1..20: note = Target: ANGPTL4; (+) strand; PAM type: NRG; PAM sequence: AGG
  source 1..20: mol_type = other DNA
cctcctgagatcgaggctgc

SEQ ID NO: 12355 - DNA, 20 bp, synthetic construct
  misc_feature 1..20: note = Description of Artificial Sequence: Synthetic oligonucleotide
  misc_feature 1..20: note = Target: ANGPTL4; (+) strand; PAM type: NRG; PAM sequence: CAG
  source 1..20: mol_type = other DNA
tcgaggctgcaggatatgct

SEQ ID NO: 12356 - DNA, 20 bp, synthetic construct
  misc_feature 1..20: note = Description of Artificial Sequence: Synthetic oligonucleotide
  misc_feature 1..20: note = Target: ANGPTL4; (+) strand; PAM type: NRG; PAM sequence: TAG
  source 1..20: mol_type = other DNA
tgcaggatatgctcagactc

SEQ ID NO: 12357 - DNA, 20 bp, synthetic construct
  misc_feature 1..20: note = Description of Artificial Sequence: Synthetic oligonucleotide
  misc_feature 1..20: note = Target: ANGPTL4; (+) strand; PAM type: NRG; PAM sequence: GAG
  source 1..20: mol_type = other DNA
caggatatgctcagactcta

SEQ ID NO: 12358 - DNA, 20 bp, synthetic construct
  misc_feature 1..20: note = Description of Artificial Sequence: Synthetic oligonucleotide
  misc_feature 1..20: note = Target: ANGPTL4; (+) strand; PAM type: NRG; PAM sequence: AGG
  source 1..20: mol_type = other DNA
aggatatgctcagactctag

SEQ ID NO: 12359 - DNA, 20 bp, synthetic construct
  misc_feature 1..20: note = Description of Artificial Sequence: Synthetic oligonucleotide
  misc_feature 1..20: note = Target: ANGPTL4; (+) strand; PAM type: NRG; PAM sequence: TGG
  source 1..20: mol_type = other DNA
atgctcagactctagaggcg

SEQ ID NO: 12360 - DNA, 20 bp, synthetic construct
  misc_feature 1..20: note = Description of Artificial Sequence: Synthetic oligonucleotide
  misc_feature 1..20: note = Target: ANGPTL4; (+) strand; PAM type: NRG; PAM sequence: AAG
  source 1..20: mol_type = other DNA
agactctagaggcgtggacc

SEQ ID NO: 12361 - DNA, 20 bp, synthetic construct
  misc_feature 1..20: note = Description of Artificial Sequence: Synthetic oligonucleotide
  misc_feature 1..20: note = Target: ANGPTL4; (+) strand; PAM type: NRG; PAM sequence: AGG
  source 1..20: mol_type = other DNA
gactctagaggcgtggacca

SEQ ID NO: 12362 - DNA, 20 bp, synthetic construct
  misc_feature 1..20: note = Description of Artificial Sequence: Synthetic oligonucleotide
  misc_feature 1..20: note = Target: ANGPTL4; (+) strand; PAM type: NRG; PAM sequence: GGG
  source 1..20: mol_type = other DNA
actctagaggcgtggaccaa

SEQ ID NO: 12363 - DNA, 20 bp, synthetic construct
  misc_feature 1..20: note = Description of Artificial Sequence: Synthetic oligonucleotide
  misc_feature 1..20: note = Target: ANGPTL4; (+) strand; PAM type: NRG; PAM sequence: GGG
  source 1..20: mol_type = other DNA
ctctagaggcgtggaccaag

SEQ ID NO: 12364 - DNA, 20 bp, synthetic construct
  misc_feature 1..20: note = Description of Artificial Sequence: Synthetic oligonucleotide
  misc_feature 1..20: note = Target: ANGPTL4; (+) strand; PAM type: NRG; PAM sequence: TGG
  source 1..20: mol_type = other DNA
gaggcgtggaccaaggggca

SEQ ID NO: 12365 - DNA, 20 bp, synthetic construct
  misc_feature 1..20: note = Description of Artificial Sequence: Synthetic oligonucleotide
  misc_feature 1..20: note = Target: ANGPTL4; (+) strand; PAM type: NRG; PAM sequence: GAG
  source 1..20: mol_type = other DNA
ggcgtggaccaaggggcatg

SEQ ID NO: 12366 - DNA, 20 bp, synthetic construct
  misc_feature 1..20: note = Description of Artificial Sequence: Synthetic oligonucleotide
  misc_feature 1..20: note = Target: ANGPTL4; (+) strand; PAM type: NRG; PAM sequence: TGG
  source 1..20: mol_type = other DNA
catggagcttcactccttgc

SEQ ID NO: 12367 - DNA, 20 bp, synthetic construct
  misc_feature 1..20: note = Description of Artificial Sequence: Synthetic oligonucleotide
  misc_feature 1..20: note = Target: ANGPTL4; (+) strand; PAM type: NRG; PAM sequence: CAG
  source 1..20: mol_type = other DNA
gagcttcactccttgctggc

SEQ ID NO: 12368 - DNA, 20 bp, synthetic construct
  misc_feature 1..20: note = Description of Artificial Sequence: Synthetic oligonucleotide
  misc_feature 1..20: note = Target: ANGPTL4; (+) strand; PAM type: NRG; PAM sequence: AGG
  source 1..20: mol_type = other DNA
agcttcactccttgctggcc

SEQ ID NO: 12369 - DNA, 20 bp, synthetic construct
  misc_feature 1..20: note = Description of Artificial Sequence: Synthetic oligonucleotide
  misc_feature 1..20: note = Target: ANGPTL4; (+) strand; PAM type: NRG; PAM sequence: GGG
  source 1..20: mol_type = other DNA
gcttcactccttgctggcca

SEQ ID NO: 12370 - DNA, 20 bp, synthetic construct
  misc_feature 1..20: note = Description of Artificial Sequence: Synthetic oligonucleotide
  misc_feature 1..20: note = Target: ANGPTL4; (+) strand; PAM type: NRG; PAM sequence: GAG
  source 1..20: mol_type = other DNA
ttcactccttgctggccagg

SEQ ID NO: 12371 - DNA, 20 bp, synthetic construct
  misc_feature 1..20: note = Description of Artificial Sequence: Synthetic oligonucleotide
  misc_feature 1..20: note = Target: ANGPTL4; (+) strand; PAM type: NRG; PAM sequence: TGG
  source 1..20: mol_type = other DNA
ctccttgctggccagggagt

SEQ ID NO: 12372 - DNA, 20 bp, synthetic construct
  misc_feature 1..20: note = Description of Artificial Sequence: Synthetic oligonucleotide
  misc_feature 1..20: note = Target: ANGPTL4; (+) strand; PAM type: NRG; PAM sequence: GGG
  source 1..20: mol_type = other DNA
tccttgctggccagggagtt

SEQ ID NO: 12373 - DNA, 20 bp, synthetic construct
  misc_feature 1..20: note = Description of Artificial Sequence: Synthetic oligonucleotide
  misc_feature 1..20: note = Target: ANGPTL4; (+) strand; PAM type: NRG; PAM sequence: GGG
  source 1..20: mol_type = other DNA
ccttgctggccagggagttg

SEQ ID NO: 12374 - DNA, 20 bp, synthetic construct
  misc_feature 1..20: note = Description of Artificial Sequence: Synthetic oligonucleotide
  misc_feature 1..20: note = Target: ANGPTL4; (+) strand; PAM type: NRG; PAM sequence: CAG
  source 1..20: mol_type = other DNA
tggccagggagttggggact

SEQ ID NO: 12375 - DNA, 20 bp, synthetic construct
  misc_feature 1..20: note = Description of Artificial Sequence: Synthetic oligonucleotide
  misc_feature 1..20: note = Target: ANGPTL4; (+) strand; PAM type: NRG; PAM sequence: GAG
  source 1..20: mol_type = other DNA
gccagggagttggggactca

SEQ ID NO: 12376 - DNA, 20 bp, synthetic construct
  misc_feature 1..20: note = Description of Artificial Sequence: Synthetic oligonucleotide
  misc_feature 1..20: note = Target: ANGPTL4; (+) strand; PAM type: NRG; PAM sequence: AGG
  source 1..20: mol_type = other DNA
ccagggagttggggactcag

SEQ ID NO: 12377 - DNA, 20 bp, synthetic construct
  misc_feature 1..20: note = Description of Artificial Sequence: Synthetic oligonucleotide
  misc_feature 1..20: note = Target: ANGPTL4; (+) strand; PAM type: NRG; PAM sequence: GGG
  source 1..20: mol_type = other DNA
cagggagttggggactcaga

SEQ ID NO: 12378 - DNA, 20 bp, synthetic construct
  misc_feature 1..20: note = Description of Artificial Sequence: Synthetic oligonucleotide
  misc_feature 1..20: note = Target: ANGPTL4; (+) strand; PAM type: NRG; PAM sequence: TGG
  source 1..20: mol_type = other DNA
ggggactcagagggaccact

SEQ ID NO: 12379 - DNA, 20 bp, synthetic construct
  misc_feature 1..20: note = Description of Artificial Sequence: Synthetic oligonucleotide
  misc_feature 1..20: note = Target: ANGPTL4; (+) strand; PAM type: NRG; PAM sequence: GGG
  source 1..20: mol_type = other DNA
gggactcagagggaccactt

SEQ ID NO: 12380 - DNA, 20 bp, synthetic construct
  misc_feature 1..20: note = Description of Artificial Sequence: Synthetic oligonucleotide
  misc_feature 1..20: note = Target: ANGPTL4; (+) strand; PAM type: NRG; PAM sequence: GGG
  source 1..20: mol_type = other DNA
ggactcagagggaccacttg

SEQ ID NO: 12381 - DNA, 20 bp, synthetic construct
  misc_feature 1..20: note = Description of Artificial Sequence: Synthetic oligonucleotide
  misc_feature 1..20: note = Target: ANGPTL4; (+) strand; PAM type: NRG; PAM sequence: CAG
  source 1..20: mol_type = other DNA
tcagagggaccacttggggc

SEQ ID NO: 12382 - DNA, 20 bp, synthetic construct
  misc_feature 1..20: note = Description of Artificial Sequence: Synthetic oligonucleotide
  misc_feature 1..20: note = Target: ANGPTL4; (+) strand; PAM type: NRG; PAM sequence: CAG
  source 1..20: mol_type = other DNA
agggaccacttggggccagc

SEQ ID NO: 12383 - DNA, 20 bp, synthetic construct
  misc_feature 1..20: note = Description of Artificial Sequence: Synthetic oligonucleotide
  misc_feature 1..20: note = Target: ANGPTL4; (+) strand; PAM type: NRG; PAM sequence: TGG
  source 1..20: mol_type = other DNA
ccacttggggccagccagac

SEQ ID NO: 12384 - DNA, 20 bp, synthetic construct
  misc_feature 1..20: note = Description of Artificial Sequence: Synthetic oligonucleotide
  misc_feature 1..20: note = Target: ANGPTL4; (+) strand; PAM type: NRG; PAM sequence: TGG
  source 1..20: mol_type = other DNA
gccagccagactggcctcaa

SEQ ID NO: 12385 - DNA, 20 bp, synthetic construct
  misc_feature 1..20: note = Description of Artificial Sequence: Synthetic oligonucleotide
  misc_feature 1..20: note = Target: ANGPTL4; (+) strand; PAM type: NRG; PAM sequence: CGG
  source 1..20: mol_type = other DNA
agccagactggcctcaatgg

SEQ ID NO: 12386 - DNA, 20 bp, synthetic construct
  misc_feature 1..20: note = Description of Artificial Sequence: Synthetic oligonucleotide
  misc_feature 1..20: note = Target: ANGPTL4; (+) strand; PAM type: NRG; PAM sequence: CAG
  source 1..20: mol_type = other DNA
actggcctcaatggcggact

SEQ ID NO: 12387 - DNA, 20 bp, synthetic construct
  misc_feature 1..20: note = Description of Artificial Sequence: Synthetic oligonucleotide
  misc_feature 1..20: note = Target: ANGPTL4; (+) strand; PAM type: NRG; PAM sequence: CGG
  source 1..20: mol_type = other DNA
gactcagtcacattgactga

SEQ ID NO: 12388 - DNA, 20 bp, synthetic construct
  misc_feature 1..20: note = Description of Artificial Sequence: Synthetic oligonucleotide
  misc_feature 1..20: note = Target: ANGPTL4; (+) strand; PAM type: NRG; PAM sequence: GGG
  source 1..20: mol_type = other DNA
actcagtcacattgactgac

SEQ ID NO: 12389 - DNA, 20 bp, synthetic construct
  misc_feature 1..20: note = Description of Artificial Sequence: Synthetic oligonucleotide
  misc_feature 1..20: note = Target: ANGPTL4; (+) strand; PAM type: NRG; PAM sequence: GGG
  source 1..20: mol_type = other DNA
ctcagtcacattgactgacg

SEQ ID NO: 12390 - DNA, 20 bp, synthetic construct
  misc_feature 1..20: note = Description of Artificial Sequence: Synthetic oligonucleotide
  misc_feature 1..20: note = Target: ANGPTL4; (+) strand; PAM type: NRG; PAM sequence: CAG
  source 1..20: mol_type = other DNA
tcacattgactgacggggac

SEQ ID NO: 12391 - DNA, 20 bp, synthetic construct
  misc_feature 1..20: note = Description of Artificial Sequence: Synthetic oligonucleotide
  misc_feature 1..20: note = Target: ANGPTL4; (+) strand; PAM type: NRG; PAM sequence: AGG
  source 1..20: mol_type = other DNA
cacattgactgacggggacc

SEQ ID NO: 12392 - DNA, 20 bp, synthetic construct
  misc_feature 1..20: note = Description of Artificial Sequence: Synthetic oligonucleotide
  misc_feature 1..20: note = Target: ANGPTL4; (+) strand; PAM type: NRG; PAM sequence: GGG
  source 1..20: mol_type = other DNA
acattgactgacggggacca

SEQ ID NO: 12393 - DNA, 20 bp, synthetic construct
  misc_feature 1..20: note = Description of Artificial Sequence: Synthetic oligonucleotide
  misc_feature 1..20: note = Target: ANGPTL4; (+) strand; PAM type: NRG; PAM sequence: TGG
  source 1..20: mol_type = other DNA
gacggggaccagggcttgtg

SEQ ID NO: 12394 - DNA, 20 bp, synthetic construct
  misc_feature 1..20: note = Description of Artificial Sequence: Synthetic oligonucleotide
  misc_feature 1..20: note = Target: ANGPTL4; (+) strand; PAM type: NRG; PAM sequence: GGG
  source 1..20: mol_type = other DNA
acggggaccagggcttgtgt

SEQ ID NO: 12395 - DNA, 20 bp, synthetic construct
  misc_feature 1..20: note = Description of Artificial Sequence: Synthetic oligonucleotide
  misc_feature 1..20: note = Target: ANGPTL4; (+) strand; PAM type: NRG; PAM sequence: GAG
  source 1..20: mol_type = other DNA
gaccagggcttgtgtgggtc

SEQ ID NO: 12396 - DNA, 20 bp, synthetic construct
  misc_feature 1..20: note = Description of Artificial Sequence: Synthetic oligonucleotide
  misc_feature 1..20: note = Target: ANGPTL4; (+) strand; PAM type: NRG; PAM sequence: GAG
  source 1..20: mol_type = other DNA
ccagggcttgtgtgggtcga

SEQ ID NO: 12397 - DNA, 20 bp, synthetic construct
  misc_feature 1..20: note = Description of Artificial Sequence: Synthetic oligonucleotide
  misc_feature 1..20: note = Target: ANGPTL4; (+) strand; PAM type: NRG; PAM sequence: TGG
  source 1..20: mol_type = other DNA
gtgggtcgagagcgccctca

SEQ ID NO: 12398 - DNA, 20 bp, synthetic construct
  misc_feature 1..20: note = Description of Artificial Sequence: Synthetic oligonucleotide
  misc_feature 1..20: note = Target: ANGPTL4; (+) strand; PAM type: NRG; PAM sequence: TGG
  source 1..20: mol_type = other DNA
cgagagcgccctcatggtgc

SEQ ID NO: 12399 - DNA, 20 bp, synthetic construct
  misc_feature 1..20: note = Description of Artificial Sequence: Synthetic oligonucleotide
  misc_feature 1..20: note = Target: ANGPTL4; (+) strand; PAM type: NRG; PAM sequence: TAG
  source 1..20: mol_type = other DNA
ggtgctggtgctgttgtgtg

SEQ ID NO: 12400 - DNA, 20 bp, synthetic construct
  misc_feature 1..20: note = Description of Artificial Sequence: Synthetic oligonucleotide
  misc_feature 1..20: note = Target: ANGPTL4; (+) strand; PAM type: NRG; PAM sequence: AGG
  source 1..20: mol_type = other DNA
gtgctggtgctgttgtgtgt

SEQ ID NO: 12401 - DNA, 20 bp, synthetic construct
  misc_feature 1..20: note = Description of Artificial Sequence: Synthetic oligonucleotide
  misc_feature 1..20: note = Target: ANGPTL4; (+) strand; PAM type: NRG; PAM sequence: TGG
  source 1..20: mol_type = other DNA
gctgttgtgtgtaggtcccc

SEQ ID NO: 12402 - DNA, 20 bp, synthetic construct
  misc_feature 1..20: note = Description of Artificial Sequence: Synthetic oligonucleotide
  misc_feature 1..20: note = Target: ANGPTL4; (+) strand; PAM type: NRG; PAM sequence: GGG
  source 1..20: mol_type = other DNA
ctgttgtgtgtaggtcccct

SEQ ID NO: 12403 - DNA, 20 bp, synthetic construct
  misc_feature 1..20: note = Description of Artificial Sequence: Synthetic oligonucleotide
  misc_feature 1..20: note = Target: ANGPTL4; (+) strand; PAM type: NRG; PAM sequence: GGG
  source 1..20: mol_type = other DNA
tgttgtgtgtaggtcccctg

SEQ ID NO: 12404 - DNA, 20 bp, synthetic construct
  misc_feature 1..20: note = Description of Artificial Sequence: Synthetic oligonucleotide
  misc_feature 1..20: note = Target: ANGPTL4; (+) strand; PAM type: NRG; PAM sequence: AAG
  source 1..20: mol_type = other DNA
tgtaggtcccctggggacac

SEQ ID NO: 12405 - DNA, 20 bp, synthetic construct
  misc_feature 1..20: note = Description of Artificial Sequence: Synthetic oligonucleotide
  misc_feature 1..20: note = Target: ANGPTL4; (+) strand; PAM type: NRG; PAM sequence: CAG
  source 1..20: mol_type = other DNA
aggtcccctggggacacaag

SEQ ID NO: 12406 - DNA, 20 bp, synthetic construct
  misc_feature 1..20: note = Description of Artificial Sequence: Synthetic oligonucleotide
  misc_feature 1..20: note = Target: ANGPTL4; (+) strand; PAM type: NRG; PAM sequence: AGG
  source 1..20: mol_type = other DNA
ggtcccctggggacacaagc

SEQ ID NO: 12407 - DNA, 20 bp, synthetic construct
  misc_feature 1..20: note = Description of Artificial Sequence: Synthetic oligonucleotide
  misc_feature 1..20: note = Target: ANGPTL4; (+) strand; PAM type: NRG; PAM sequence: TGG
  source 1..20: mol_type = other DNA
gggacacaagcaggcgccaa

SEQ ID NO: 12408 - DNA, 20 bp, synthetic construct
  misc_feature 1..20: note = Description of Artificial Sequence: Synthetic oligonucleotide
  misc_feature 1..20: note = Target: ANGPTL4; (+) strand; PAM type: NRG; PAM sequence: TGG
  source 1..20: mol_type = other DNA
aagcaggcgccaatggtatc

SEQ ID NO: 12409 - DNA, 20 bp, synthetic construct
  misc_feature 1..20: note = Description of Artificial Sequence: Synthetic oligonucleotide
  misc_feature 1..20: note = Target: ANGPTL4; (+) strand; PAM type: NRG; PAM sequence: GGG
  source 1..20: mol_type = other DNA
agcaggcgccaatggtatct

SEQ ID NO: 12410 - DNA, 20 bp, synthetic construct
  misc_feature 1..20: note = Description of Artificial Sequence: Synthetic oligonucleotide
  misc_feature 1..20: note = Target: ANGPTL4; (+) strand; PAM type: NRG; PAM sequence: CGG
  source 1..20: mol_type = other DNA
aggcgccaatggtatctggg

SEQ ID NO: 12411 - DNA, 20 bp, synthetic construct
  misc_feature 1..20: note = Description of Artificial Sequence: Synthetic oligonucleotide
  misc_feature 1..20: note = Target: ANGPTL4; (+) strand; PAM type: NRG; PAM sequence: GAG
  source 1..20: mol_type = other DNA
gcgccaatggtatctgggcg

SEQ ID NO: 12412 - DNA, 20 bp, synthetic construct
  misc_feature 1..20: note = Description of Artificial Sequence: Synthetic oligonucleotide
  misc_feature 1..20: note = Target: ANGPTL4; (+) strand; PAM type: NRG; PAM sequence: CAG
  source 1..20: mol_type = other DNA
tggtatctgggcggagctca

SEQ ID NO: 12413 - DNA, 20 bp, synthetic construct
  misc_feature 1..20: note = Description of Artificial Sequence: Synthetic oligonucleotide
  misc_feature 1..20: note = Target: ANGPTL4; (+) strand; PAM type: NRG; PAM sequence: GAG
  source 1..20: mol_type = other DNA
gtatctgggcggagctcaca

SEQ ID NO: 12414 - DNA, 20 bp, synthetic construct
  misc_feature 1..20: note = Description of Artificial Sequence: Synthetic oligonucleotide
  misc_feature 1..20: note = Target: ANGPTL4; (+) strand; PAM type: NRG; PAM sequence: TGG
  source 1..20: mol_type = other DNA
ggcggagctcacagagttct

SEQ ID NO: 12415 - DNA, 20 bp, synthetic construct
  misc_feature 1..20: note = Description of Artificial Sequence: Synthetic oligonucleotide
  misc_feature 1..20: note = Target: ANGPTL4; (+) strand; PAM type: NRG; PAM sequence: AAG
  source 1..20: mol_type = other DNA
tcacagagttcttggaataa

SEQ ID NO: 12416 - DNA, 20 bp, synthetic construct
  misc_feature 1..20: note = Description of Artificial Sequence: Synthetic oligonucleotide
  misc_feature 1..20: note = Target: ANGPTL4; (+) strand; PAM type: NRG; PAM sequence: CAG
  source 1..20: mol_type = other DNA
tcttggaataaaagcaacct

SEQ ID NO: 12417 - DNA, 20 bp, synthetic construct
  misc_feature 1..20: note = Description of Artificial Sequence: Synthetic oligonucleotide
  misc_feature 1..20: note = Target: ANGPTL4; (+) strand; PAM type: NRG; PAM sequence: TAG
  source 1..20: mol_type = other DNA
ttcttttttttctctttctt

SEQ ID NO: 12418 - DNA, 20 bp, synthetic construct
  misc_feature 1..20: note = Description of Artificial Sequence: Synthetic oligonucleotide
  misc_feature 1..20: note = Target: ANGPTL4; (+) strand; PAM type: NRG; PAM sequence: CAG
  source 1..20: mol_type = other DNA
ttttctctttctttagttca

SEQ ID NO: 12419 - DNA, 20 bp, synthetic construct
  misc_feature 1..20: note = Description of Artificial Sequence: Synthetic oligonucleotide
  misc_feature 1..20: note = Target: ANGPTL4; (+) strand; PAM type: NRG; PAM sequence: TAG
  source 1..20: mol_type = other DNA
ctttctttagttcacagatc

SEQ ID NO: 12420 - DNA, 20 bp, synthetic construct
  misc_feature 1..20: note = Description of Artificial Sequence: Synthetic oligonucleotide
  misc_feature 1..20: note = Target: ANGPTL4; (+) strand; PAM type: NRG; PAM sequence: AAG
  source 1..20: mol_type = other DNA
ctttagttcacagatctagt

SEQ ID NO: 12421 - DNA, 20 bp, synthetic construct
  misc_feature 1..20: note = Description of Artificial Sequence: Synthetic oligonucleotide
  misc_feature 1..20: note = Target: ANGPTL4; (+) strand; PAM type: NRG; PAM sequence: CAG
  source 1..20: mol_type = other DNA
cagatctagtaagttaccct

SEQ ID NO: 12422 - DNA, 20 bp, synthetic construct
  misc_feature 1..20: note = Description of Artificial Sequence: Synthetic oligonucleotide
  misc_feature 1..20: note = Target: ANGPTL4; (+) strand; PAM type: NRG; PAM sequence: AAG
  source 1..20: mol_type = other DNA
taccctcagtttgttttaaa

SEQ ID NO: 12423 - DNA, 20 bp, synthetic construct
  misc_feature 1..20: note = Description of Artificial Sequence: Synthetic oligonucleotide
  misc_feature 1..20: note = Target: ANGPTL4; (+) strand; PAM type: NRG; PAM sequence: AAG
  source 1..20: mol_type = other DNA
tttgttttaaaaagtgaaca

SEQ ID NO: 12424 - DNA, 20 bp, synthetic construct
  misc_feature 1..20: note = Description of Artificial Sequence: Synthetic oligonucleotide
  misc_feature 1..20: note = Target: ANGPTL4; (+) strand; PAM type: NRG; PAM sequence: CAG
  source 1..20: mol_type = other DNA
agtccatgtaaacatgttcc

SEQ ID NO: 12425 - DNA, 20 bp, synthetic construct
  misc_feature 1..20: note = Description of Artificial Sequence: Synthetic oligonucleotide
  misc_feature 1..20: note = Target: ANGPTL4; (+) strand; PAM type: NRG; PAM sequence: AGG
  source 1..20: mol_type = other DNA
gtccatgtaaacatgttccc

SEQ ID NO: 12426 - DNA, 20 bp, synthetic construct
  misc_feature 1..20: note = Description of Artificial Sequence: Synthetic oligonucleotide
  misc_feature 1..20: note = Target: ANGPTL4; (+) strand; PAM type: NRG; PAM sequence: GGG
  source 1..20: mol_type = other DNA
tccatgtaaacatgttccca

SEQ ID NO: 12427 - DNA, 20 bp, synthetic construct
  misc_feature 1..20: note = Description of Artificial Sequence: Synthetic oligonucleotide
  misc_feature 1..20: note = Target: ANGPTL4; (+) strand; PAM type: NRG; PAM sequence: CAG
  source 1..20: mol_type = other DNA
tgtaaacatgttcccagggc

SEQ ID NO: 12428 - DNA, 20 bp, synthetic construct
  misc_feature 1..20: note = Description of Artificial Sequence: Synthetic oligonucleotide
  misc_feature 1..20: note = Target: ANGPTL4; (+) strand; PAM type: NRG; PAM sequence: AGG
  source 1..20: mol_type = other DNA
gtaaacatgttcccagggcc

SEQ ID NO: 12429 - DNA, 20 bp, synthetic construct
  misc_feature 1..20: note = Description of Artificial Sequence: Synthetic oligonucleotide
  misc_feature 1..20: note = Target: ANGPTL4; (+) strand; PAM type: NRG; PAM sequence: CGG
  source 1..20: mol_type = other DNA
catgttcccagggccaggca

SEQ ID NO: 12430 - DNA, 20 bp, synthetic construct
  misc_feature 1..20: note = Description of Artificial Sequence: Synthetic oligonucleotide
  misc_feature 1..20: note = Target: ANGPTL4; (+) strand; PAM type: NRG; PAM sequence: CAG
  source 1..20: mol_type = other DNA
gtgtctcgtgcctgtaatcc

SEQ ID NO: 12431 - DNA, 20 bp, synthetic construct
  misc_feature 1..20: note = Description of Artificial Sequence: Synthetic oligonucleotide
  misc_feature 1..20: note = Target: ANGPTL4; (+) strand; PAM type: NRG; PAM sequence: GAG
  source 1..20: mol_type = other DNA
ctgtaatcccagccatttgt

SEQ ID NO: 12432 - DNA, 20 bp, synthetic construct
  misc_feature 1..20: note = Description of Artificial Sequence: Synthetic oligonucleotide
  misc_feature 1..20: note = Target: ANGPTL4; (+) strand; PAM type: NRG; PAM sequence: AGG
  source 1..20: mol_type = other DNA
tgtaatcccagccatttgtg

SEQ ID NO: 12433 - DNA, 20 bp, synthetic construct
  misc_feature 1..20: note = Description of Artificial Sequence: Synthetic oligonucleotide
  misc_feature 1..20: note = Target: ANGPTL4; (+) strand; PAM type: NRG; PAM sequence: GAG
  source 1..20: mol_type = other DNA
tcccagccatttgtgaggcc

SEQ ID NO: 12434 - DNA, 20 bp, synthetic construct
  misc_feature 1..20: note = Description of Artificial Sequence: Synthetic oligonucleotide
  misc_feature 1..20: note = Target: ANGPTL4; (+) strand; PAM type: NRG; PAM sequence: CAG
  source 1..20: mol_type = other DNA
agccatttgtgaggccgaga

SEQ ID NO: 12435 - DNA, 20 bp, synthetic construct
  misc_feature 1..20: note = Description of Artificial Sequence: Synthetic oligonucleotide
  misc_feature 1..20: note = Target: ANGPTL4; (+) strand; PAM type: NRG; PAM sequence: AGG
  source 1..20: mol_type = other DNA
gccatttgtgaggccgagac

SEQ ID NO: 12436 - DNA, 20 bp, synthetic construct
  misc_feature 1..20: note = Description of Artificial Sequence: Synthetic oligonucleotide
  misc_feature 1..20: note = Target: ANGPTL4; (+) strand; PAM type: NRG; PAM sequence: CAG
  source 1..20: mol_type = other DNA
atttgtgaggccgagacagg

SEQ ID NO: 12437 - DNA, 20 bp, synthetic construct
  misc_feature 1..20: note = Description of Artificial Sequence: Synthetic oligonucleotide
  misc_feature 1..20: note = Target: ANGPTL4; (+) strand; PAM type: NRG; PAM sequence: AGG
  source 1..20: mol_type = other DNA
tttgtgaggccgagacaggc

SEQ ID NO: 12438 - DNA, 20 bp, synthetic construct
  misc_feature 1..20: note = Description of Artificial Sequence: Synthetic oligonucleotide
  misc_feature 1..20: note = Target: ANGPTL4; (+) strand; PAM type: NRG; PAM sequence: GAG
  source 1..20: mol_type = other DNA
ccgagacaggcaggtcactt

SEQ ID NO: 12439 - DNA, 20 bp, synthetic construct
  misc_feature 1..20: note = Description of Artificial Sequence: Synthetic oligonucleotide
  misc_feature 1..20: note = Target: ANGPTL4; (+) strand; PAM type: NRG; PAM sequence: AGG
  source 1..20: mol_type = other DNA
cgagacaggcaggtcacttg

SEQ ID NO: 12440 - DNA, 20 bp, synthetic construct
  misc_feature 1..20: note = Description of Artificial Sequence: Synthetic oligonucleotide
  misc_feature 1..20: note = Target: ANGPTL4; (+) strand; PAM type: NRG; PAM sequence: CAG
  source 1..20: mol_type = other DNA
acaggcaggtcacttgaggt

SEQ ID NO: 12441 - DNA, 20 bp, synthetic construct
  misc_feature 1..20: note = Description of Artificial Sequence: Synthetic oligonucleotide
  misc_feature 1..20: note = Target: ANGPTL4; (+) strand; PAM type: NRG; PAM sequence: CAG
  source 1..20: mol_type = other DNA
ggcaggtcacttgaggtcag

SEQ ID NO: 12442 - DNA, 20 bp, synthetic construct
  misc_feature 1..20: note = Description of Artificial Sequence: Synthetic oligonucleotide
  misc_feature 1..20: note = Target: ANGPTL4; (+) strand; PAM type: NRG; PAM sequence: GAG
  source 1..20: mol_type = other DNA
tcacttgaggtcagcagttc

SEQ ID NO: 12443 - DNA, 20 bp, synthetic construct
  misc_feature 1..20: note = Description of Artificial Sequence: Synthetic oligonucleotide
  misc_feature 1..20: note = Target: ANGPTL4; (+) strand; PAM type: NRG; PAM sequence: CAG
  source 1..20: mol_type = other DNA
tgaggtcagcagttcgagac

SEQ ID NO: 12444 - DNA, 20 bp, synthetic construct
  misc_feature 1..20: note = Description of Artificial Sequence: Synthetic oligonucleotide
  misc_feature 1..20: note = Target: ANGPTL4; (+) strand; PAM type: NRG; PAM sequence: CGG
  source 1..20: mol_type = other DNA
gtcagcagttcgagaccagc

SEQ ID NO: 12445 - DNA, 20 bp, synthetic construct
  misc_feature 1..20: note = Description of Artificial Sequence: Synthetic oligonucleotide
  misc_feature 1..20: note = Target: ANGPTL4; (+) strand; PAM type: NRG; PAM sequence: GGG
  source 1..20: mol_type = other DNA
tcagcagttcgagaccagcc

SEQ ID NO: 12446 - DNA, 20 bp, synthetic construct
  misc_feature 1..20: note = Description of Artificial Sequence: Synthetic oligonucleotide
  misc_feature 1..20: note = Target: ANGPTL4; (+) strand; PAM type: NRG; PAM sequence: TGG
  source 1..20: mol_type = other DNA
cgagaccagccgggccaaca

SEQ ID NO: 12447 - DNA, 20 bp, synthetic construct
  misc_feature 1..20: note = Description of Artificial Sequence: Synthetic oligonucleotide
  misc_feature 1..20: note = Target: ANGPTL4; (+) strand; PAM type: NRG; PAM sequence: TGG
  source 1..20: mol_type = other DNA
gaccagccgggccaacatgg

SEQ ID NO: 12448 - DNA, 20 bp, synthetic construct
  misc_feature 1..20: note = Description of Artificial Sequence: Synthetic oligonucleotide
  misc_feature 1..20: note = Target: ANGPTL4; (+) strand; PAM type: NRG; PAM sequence: TAG
  source 1..20: mol_type = other DNA
ctacaaaaaaatacaaaaat

SEQ ID NO: 12449 - DNA, 20 bp, synthetic construct
  misc_feature 1..20: note = Description of Artificial Sequence: Synthetic oligonucleotide
  misc_feature 1..20: note = Target: ANGPTL4; (+) strand; PAM type: NRG; PAM sequence: GAG
  source 1..20: mol_type = other DNA
aaaaaatacaaaaattagcc

SEQ ID NO: 12450 - DNA, 20 bp, synthetic construct
  misc_feature 1..20: note = Description of Artificial Sequence: Synthetic oligonucleotide
  misc_feature 1..20: note = Target: ANGPTL4; (+) strand; PAM type: NRG; PAM sequence: TGG
  source 1..20: mol_type = other DNA
atacaaaaattagccgagca

SEQ ID NO: 12451 - DNA, 20 bp, synthetic construct
  misc_feature 1..20: note = Description of Artificial Sequence: Synthetic oligonucleotide
  misc_feature 1..20: note = Target: ANGPTL4; (+) strand; PAM type: NRG; PAM sequence: TGG
  source 1..20: mol_type = other DNA
caaaaattagccgagcatgg

SEQ ID NO: 12452 - DNA, 20 bp, synthetic construct
  misc_feature 1..20: note = Description of Artificial Sequence: Synthetic oligonucleotide
  misc_feature 1..20: note = Target: ANGPTL4; (+) strand; PAM type: NRG; PAM sequence: TAG
  source 1..20: mol_type = other DNA
agcatggtggtgcacgtctg

SEQ ID NO: 12453 - DNA, 20 bp, synthetic construct
  misc_feature 1..20: note = Description of Artificial Sequence: Synthetic oligonucleotide
  misc_feature 1..20: note = Target: ANGPTL4; (+) strand; PAM type: NRG; PAM sequence: CAG
  source 1..20: mol_type = other DNA
gtggtgcacgtctgtagtcc

SEQ ID NO: 12454 - DNA, 20 bp, synthetic construct
  misc_feature 1..20: note = Description of Artificial Sequence: Synthetic oligonucleotide
  misc_feature 1..20: note = Target: ANGPTL4; (+) strand; PAM type: NRG; PAM sequence: TAG
  source 1..20: mol_type = other DNA
gtctgtagtcccagctactc

SEQ ID NO: 12455 - DNA, 20 bp, synthetic construct
  misc_feature 1..20: note = Description of Artificial Sequence: Synthetic oligonucleotide
  misc_feature 1..20: note = Target: ANGPTL4; (+) strand; PAM type: NRG; PAM sequence: GAG
  source 1..20: mol_type = other DNA
ctgtagtcccagctactcta

SEQ ID NO: 12456 - DNA, 20 bp, synthetic construct
  misc_feature 1..20: note = Description of Artificial Sequence: Synthetic oligonucleotide
  misc_feature 1..20: note = Target: ANGPTL4; (+) strand; PAM type: NRG; PAM sequence: AGG
  source 1..20: mol_type = other DNA
tgtagtcccagctactctag

SEQ ID NO: 12457 - DNA, 20 bp, synthetic construct
  misc_feature 1..20: note = Description of Artificial Sequence: Synthetic oligonucleotide
  misc_feature 1..20: note = Target: ANGPTL4; (+) strand; PAM type: NRG; PAM sequence: CAG
  source 1..20: mol_type = other DNA
agctactctagaggctgacg

SEQ ID NO: 12458 - DNA, 20 bp, synthetic construct
  misc_feature 1..20: note = Description of Artificial Sequence: Synthetic oligonucleotide
  misc_feature 1..20: note = Target: ANGPTL4; (+) strand; PAM type: NRG; PAM sequence: AAG
  source 1..20: mol_type = other DNA
tactctagaggctgacgcag

SEQ ID NO: 12459 - DNA, 20 bp, synthetic construct
  misc_feature 1..20: note = Description of Artificial Sequence: Synthetic oligonucleotide
  misc_feature 1..20: note = Target: ANGPTL4; (+) strand; PAM type: NRG; PAM sequence: GAG
  source 1..20: mol_type = other DNA
ctgacgcagaagaatcactt

SEQ ID NO: 12460 - DNA, 20 bp, synthetic construct
  misc_feature 1..20: note = Description of Artificial Sequence: Synthetic oligonucleotide
  misc_feature 1..20: note = Target: ANGPTL4; (+) strand; PAM type: NRG; PAM sequence: AAG
  source 1..20: mol_type = other DNA
gcagaagaatcacttgagcc

SEQ ID NO: 12461 - DNA, 20 bp, synthetic construct
  misc_feature 1..20: note = Description of Artificial Sequence: Synthetic oligonucleotide
  misc_feature 1..20: note = Target: ANGPTL4; (+) strand; PAM type: NRG; PAM sequence: AGG
  source 1..20: mol_type = other DNA
cagaagaatcacttgagcca

SEQ ID NO: 12462 - DNA, 20 bp, synthetic construct
  misc_feature 1..20: note = Description of Artificial Sequence: Synthetic oligonucleotide
  misc_feature 1..20: note = Target: ANGPTL4; (+) strand; PAM type: NRG; PAM sequence: GAG
  source 1..20: mol_type = other DNA
gaagaatcacttgagccaag

SEQ ID NO: 12463 - DNA, 20 bp, synthetic construct
  misc_feature 1..20: note = Description of Artificial Sequence: Synthetic oligonucleotide
  misc_feature 1..20: note = Target: ANGPTL4; (+) strand; PAM type: NRG; PAM sequence: AGG
  source 1..20: mol_type = other DNA
aagaatcacttgagccaagg

SEQ ID NO: 12464 - DNA, 20 bp, synthetic construct
  misc_feature 1..20: note = Description of Artificial Sequence: Synthetic oligonucleotide
  misc_feature 1..20: note = Target: ANGPTL4; (+) strand; PAM type: NRG; PAM sequence: CAG
  source 1..20: mol_type = other DNA
aatcacttgagccaaggagg

SEQ ID NO: 12465 - DNA, 20 bp, synthetic construct
  misc_feature 1..20: note = Description of Artificial Sequence: Synthetic oligonucleotide
  misc_feature 1..20: note = Target: ANGPTL4; (+) strand; PAM type: NRG; PAM sequence: GAG
  source 1..20: mol_type = other DNA
tcacttgagccaaggaggca

SEQ ID NO: 12466 - DNA, 20 bp, synthetic construct
  misc_feature 1..20: note = Description of Artificial Sequence: Synthetic oligonucleotide
  misc_feature 1..20: note = Target: ANGPTL4; (+) strand; PAM type: NRG; PAM sequence: AGG
  source 1..20: mol_type = other DNA
cacttgagccaaggaggcag

SEQ ID NO: 12467 - DNA, 20 bp, synthetic construct
  misc_feature 1..20: note = Description of Artificial Sequence: Synthetic oligonucleotide
  misc_feature 1..20: note = Target: ANGPTL4; (+) strand; PAM type: NRG; PAM sequence: AAG
  source 1..20: mol_type = other DNA
aggaggcagaggctgcaaat

SEQ ID NO: 12468 - DNA, 20 bp, synthetic construct
  misc_feature 1..20: note = Description of Artificial Sequence: Synthetic oligonucleotide
  misc_feature 1..20: note = Target: ANGPTL4; (+) strand; PAM type: NRG; PAM sequence: GAG
  source 1..20: mol_type = other DNA
gcagaggctgcaaataagcc

SEQ ID NO: 12469 - DNA, 20 bp, synthetic construct
  misc_feature 1..20: note = Description of Artificial Sequence: Synthetic oligonucleotide
  misc_feature 1..20: note = Target: ANGPTL4; (+) strand; PAM type: NRG; PAM sequence: CAG
  source 1..20: mol_type = other DNA
gagattgcgccactgcactc

SEQ ID NO: 12470 - DNA, 20 bp, synthetic construct
  misc_feature 1..20: note = Description of Artificial Sequence: Synthetic oligonucleotide
  misc_feature 1..20: note = Target: ANGPTL4; (+) strand; PAM type: NRG; PAM sequence: TGG
  source 1..20: mol_type = other DNA
tgcgccactgcactccagcc

SEQ ID NO: 12471 - DNA, 20 bp, synthetic construct
  misc_feature 1..20: note = Description of Artificial Sequence: Synthetic oligonucleotide
  misc_feature 1..20: note = Target: ANGPTL4; (+) strand; PAM type: NRG; PAM sequence: GGG
  source 1..20: mol_type = other DNA
gcgccactgcactccagcct

SEQ ID NO: 12472 - DNA, 20 bp, synthetic construct
  misc_feature 1..20: note = Description of Artificial Sequence: Synthetic oligonucleotide
  misc_feature 1..20: note = Target: ANGPTL4; (+) strand; PAM type: NRG; PAM sequence: CAG
  source 1..20: mol_type = other DNA
ctgcactccagcctgggcaa

SEQ ID NO: 12473 - DNA, 20 bp, synthetic construct
  misc_feature 1..20: note = Description of Artificial Sequence: Synthetic oligonucleotide
  misc_feature 1..20: note = Target: ANGPTL4; (+) strand; PAM type: NRG; PAM sequence: GAG
  source 1..20: mol_type = other DNA
gcactccagcctgggcaaca

SEQ ID NO: 12474 - DNA, 20 bp, synthetic construct
  misc_feature 1..20: note = Description of Artificial Sequence: Synthetic oligonucleotide
  misc_feature 1..20: note = Target: ANGPTL4; (+) strand; PAM type: NRG; PAM sequence: AAG
  source 1..20: mol_type = other DNA
tccagcctgggcaacagagc

SEQ ID NO: 12475 - DNA, 20 bp, synthetic construct
  misc_feature 1..20: note = Description of Artificial Sequence: Synthetic oligonucleotide
  misc_feature 1..20: note = Target: ANGPTL4; (+) strand; PAM type: NRG; PAM sequence: TAG
  source 1..20: mol_type = other DNA
caaaaataatttttttttcg

SEQ ID NO: 12476 - DNA, 20 bp, synthetic construct
  misc_feature 1..20: note = Description of Artificial Sequence: Synthetic oligonucleotide
  misc_feature 1..20: note = Target: ANGPTL4; (+) strand; PAM type: NRG; PAM sequence: GAG
  source 1..20: mol_type = other DNA
aaaataatttttttttcgta

SEQ ID NO: 12477 - DNA, 20 bp, synthetic construct
  misc_feature 1..20: note = Description of Artificial Sequence: Synthetic oligonucleotide
  misc_feature 1..20: note = Target: ANGPTL4; (+) strand; PAM type: NRG; PAM sequence: AGG
  source 1..20: mol_type = other DNA
aaataatttttttttcgtag

SEQ ID NO: 12478 - DNA, 20 bp, synthetic construct
  misc_feature 1..20: note = Description of Artificial Sequence: Synthetic oligonucleotide
  misc_feature 1..20: note = Target: ANGPTL4; (+) strand; PAM type: NRG; PAM sequence: CAG
  source 1..20: mol_type = other DNA
taatttttttttcgtagagg

SEQ ID NO: 12479 - DNA, 20 bp, synthetic construct
  misc_feature 1..20: note = Description of Artificial Sequence: Synthetic oligonucleotide
  misc_feature 1..20: note = Target: ANGPTL4; (+) strand; PAM type: NRG; PAM sequence: AGG
  source 1..20: mol_type = other DNA
aatttttttttcgtagaggc

SEQ ID NO: 12480 - DNA, 20 bp, synthetic construct
  misc_feature 1..20: note = Description of Artificial Sequence: Synthetic oligonucleotide
  misc_feature 1..20: note = Target: ANGPTL4; (+) strand; PAM type: NRG; PAM sequence: GGG
  source 1..20: mol_type = other DNA
atttttttttcgtagaggca

SEQ ID NO: 12481 - DNA, 20 bp, synthetic construct
  misc_feature 1..20: note = Description of Artificial Sequence: Synthetic oligonucleotide
  misc_feature 1..20: note = Target: ANGPTL4; (+) strand; PAM type: NRG; PAM sequence: CAG
  source 1..20: mol_type = other DNA
cagggtctcattctattgtc

SEQ ID NO: 12482 - DNA, 20 bp, synthetic construct
  misc_feature 1..20: note = Description of Artificial Sequence: Synthetic oligonucleotide
  misc_feature 1..20: note = Target: ANGPTL4; (+) strand; PAM type: NRG; PAM sequence: AGG
  source 1..20: mol_type = other DNA
agggtctcattctattgtcc

SEQ ID NO: 12483 - DNA, 20 bp, synthetic construct
  misc_feature 1..20: note = Description of Artificial Sequence: Synthetic oligonucleotide
  misc_feature 1..20: note = Target: ANGPTL4; (+) strand; PAM type: NRG; PAM sequence: TGG
  source 1..20: mol_type = other DNA
tctcattctattgtccaggc

SEQ ID NO: 12484 - DNA, 20 bp, synthetic construct
  misc_feature 1..20: note = Description of Artificial Sequence: Synthetic oligonucleotide
  misc_feature 1..20: note = Target: ANGPTL4; (+) strand; PAM type: NRG; PAM sequence: GAG
  source 1..20: mol_type = other DNA
ccaggctggtctcaaacacc

SEQ ID NO: 12485 - DNA, 20 bp, synthetic construct
  misc_feature 1..20: note = Description of Artificial Sequence: Synthetic oligonucleotide
  misc_feature 1..20: note = Target: ANGPTL4; (+) strand; PAM type: NRG; PAM sequence: AAG
  source 1..20: mol_type = other DNA
ggtctcaaacaccgagactc

SEQ ID NO: 12486 - DNA, 20 bp, synthetic construct
  misc_feature 1..20: note = Description of Artificial Sequence: Synthetic oligonucleotide
  misc_feature 1..20: note = Target: ANGPTL4; (+) strand; PAM type: NRG; PAM sequence: AGG
  source 1..20: mol_type = other DNA
gtctcaaacaccgagactca

SEQ ID NO: 12487 - DNA, 20 bp, synthetic construct
  misc_feature 1..20: note = Description of Artificial Sequence: Synthetic oligonucleotide
  misc_feature 1..20: note = Target: ANGPTL4; (+) strand; PAM type: NRG; PAM sequence: GGG
  source 1..20: mol_type = other DNA
tctcaaacaccgagactcaa

SEQ ID NO: 12488 - DNA, 20 bp, synthetic construct
  misc_feature 1..20: note = Description of Artificial Sequence: Synthetic oligonucleotide
  misc_feature 1..20: note = Target: ANGPTL4; (+) strand; PAM type: NRG; PAM sequence: TGG
  source 1..20: mol_type = other DNA
ctcaagggatcctcctgcct

SEQ ID NO: 12489 - DNA, 20 bp, synthetic construct
  misc_feature 1..20: note = Description of Artificial Sequence: Synthetic oligonucleotide
  misc_feature 1..20: note = Target: ANGPTL4; (+) strand; PAM type: NRG; PAM sequence: AAG
  source 1..20: mol_type = other DNA
cctcctgccttggcttcaca

SEQ ID NO: 12490 - DNA, 20 bp, synthetic construct
  misc_feature 1..20: note = Description of Artificial Sequence: Synthetic oligonucleotide
  misc_feature 1..20: note = Target: ANGPTL4; (+) strand; PAM type: NRG; PAM sequence: TGG
  source 1..20: mol_type = other DNA
gccttggcttcacaaagtga

SEQ ID NO: 12491 - DNA, 20 bp, synthetic construct
  misc_feature 1..20: note = Description of Artificial Sequence: Synthetic oligonucleotide
  misc_feature 1..20: note = Target: ANGPTL4; (+) strand; PAM type: NRG; PAM sequence: GGG
  source 1..20: mol_type = other DNA
ccttggcttcacaaagtgat

SEQ ID NO: 12492 - DNA, 20 bp, synthetic construct
  misc_feature 1..20: note = Description of Artificial Sequence: Synthetic oligonucleotide
  misc_feature 1..20: note = Target: ANGPTL4; (+) strand; PAM type: NRG; PAM sequence: AAG
  source 1..20: mol_type = other DNA
ttcacaaagtgatgggatta

SEQ ID NO: 12493 - DNA, 20 bp, synthetic construct
  misc_feature 1..20: note = Description of Artificial Sequence: Synthetic oligonucleotide
  misc_feature 1..20: note = Target: ANGPTL4; (+) strand; PAM type: NRG; PAM sequence: AGG
  source 1..20: mol_type = other DNA
tcacaaagtgatgggattaa

SEQ ID NO: 12494 - DNA, 20 bp, synthetic construct
  misc_feature 1..20: note = Description of Artificial Sequence: Synthetic oligonucleotide
  misc_feature 1..20: note = Target: ANGPTL4; (+) strand; PAM type: NRG; PAM sequence: GAG
  source 1..20: mol_type = other DNA
agtgatgggattaaaggtgt

SEQ ID NO: 12495 - DNA, 20 bp, synthetic construct
  misc_feature 1..20: note = Description of Artificial Sequence: Synthetic oligonucleotide
  misc_feature 1..20: note = Target: ANGPTL4; (+) strand; PAM type: NRG; PAM sequence: AAG
  source 1..20: mol_type = other DNA
cgccactgcacccacccctg

SEQ ID NO: 12496 - DNA, 20 bp, synthetic construct
  misc_feature 1..20: note = Description of Artificial Sequence: Synthetic oligonucleotide
  misc_feature 1..20: note = Target: ANGPTL4; (+) strand; PAM type: NRG; PAM sequence: AGG
  source 1..20: mol_type = other DNA
gccactgcacccacccctga

SEQ ID NO: 12497 - DNA, 20 bp, synthetic construct
  misc_feature 1..20: note = Description of Artificial Sequence: Synthetic oligonucleotide
  misc_feature 1..20: note = Target: ANGPTL4; (+) strand; PAM type: NRG; PAM sequence: AAG
  source 1..20: mol_type = other DNA
tttgttaaaaaaaaaaaaaa

SEQ ID NO: 12498 - DNA, 20 bp, synthetic construct
  misc_feature 1..20: note = Description of Artificial Sequence: Synthetic oligonucleotide
  misc_feature 1..20: note = Target: ANGPTL4; (+) strand; PAM type: NRG; PAM sequence: TGG
  source 1..20: mol_type = other DNA
ttaaaaaaaaaaaaaaaaga

SEQ ID NO: 12499 - DNA, 20 bp, synthetic construct
  misc_feature 1..20: note = Description of Artificial Sequence: Synthetic oligonucleotide
  misc_feature 1..20: note = Target: ANGPTL4; (+) strand; PAM type: NRG; PAM sequence: TGG
  source 1..20: mol_type = other DNA
aaaaaaaaaaaaagatggcg

SEQ ID NO: 12500 - DNA, 20 bp, synthetic construct
  misc_feature 1..20: note = Description of Artificial Sequence: Synthetic oligonucleotide
  misc_feature 1..20: note = Target: ANGPTL4; (+) strand; PAM type: NRG; PAM sequence: CAG
  source 1..20: mol_type = other DNA
gtcgctcatgcctgtaatcc

SEQ ID NO: 12501 - DNA, 20 bp, synthetic construct
  misc_feature 1..20: note = Description of Artificial Sequence: Synthetic oligonucleotide
  misc_feature 1..20: note = Target: ANGPTL4; (+) strand; PAM type: NRG; PAM sequence: TAG
  source 1..20: mol_type = other DNA
tgcctgtaatcccagcactt

SEQ ID NO: 12502 - DNA, 20 bp, synthetic construct
  misc_feature 1..20: note = Description of Artificial Sequence: Synthetic oligonucleotide
  misc_feature 1..20: note = Target: ANGPTL4; (+) strand; PAM type: NRG; PAM sequence: AGG
  source 1..20: mol_type = other DNA
gcctgtaatcccagcacttt

SEQ ID NO: 12503 - DNA, 20 bp, synthetic construct
  misc_feature 1..20: note = Description of Artificial Sequence: Synthetic oligonucleotide
  misc_feature 1..20: note = Target: ANGPTL4; (+) strand; PAM type: NRG; PAM sequence: GAG
  source 1..20: mol_type = other DNA
ctgtaatcccagcactttag

SEQ ID NO: 12504 - DNA, 20 bp, synthetic construct
  misc_feature 1..20: note = Description of Artificial Sequence: Synthetic oligonucleotide
  misc_feature 1..20: note = Target: ANGPTL4; (+) strand; PAM type: NRG; PAM sequence: AGG
  source 1..20: mol_type = other DNA
tgtaatcccagcactttagg

SEQ ID NO: 12505 - DNA, 20 bp, synthetic construct
  misc_feature 1..20: note = Description of Artificial Sequence: Synthetic oligonucleotide
  misc_feature 1..20: note = Target: ANGPTL4; (+) strand; PAM type: NRG; PAM sequence: GAG
  source 1..20: mol_type = other DNA
tcccagcactttaggaggcc

SEQ ID NO: 12506 - DNA, 20 bp, synthetic construct
  misc_feature 1..20: note = Description of Artificial Sequence: Synthetic oligonucleotide
  misc_feature 1..20: note = Target: ANGPTL4; (+) strand; PAM type: NRG; PAM sequence: AGG
  source 1..20: mol_type = other DNA
cccagcactttaggaggccg

SEQ ID NO: 12507 - DNA, 20 bp, synthetic construct
  misc_feature 1..20: note = Description of Artificial Sequence: Synthetic oligonucleotide
  misc_feature 1..20: note = Target: ANGPTL4; (+) strand; PAM type: NRG; PAM sequence: CAG
  source 1..20: mol_type = other DNA
agcactttaggaggccgagg

SEQ ID NO: 12508 - DNA, 20 bp, synthetic construct
  misc_feature 1..20: note = Description of Artificial Sequence: Synthetic oligonucleotide
  misc_feature 1..20: note = Target: ANGPTL4; (+) strand; PAM type: NRG; PAM sequence: AGG
  source 1..20: mol_type = other DNA
gcactttaggaggccgaggc

SEQ ID NO: 12509 - DNA, 20 bp, synthetic construct
  misc_feature 1..20: note = Description of Artificial Sequence: Synthetic oligonucleotide
  misc_feature 1..20: note = Target: ANGPTL4; (+) strand; PAM type: NRG; PAM sequence: TGG
  source 1..20: mol_type = other DNA
ctttaggaggccgaggcagg

SEQ ID NO: 12510 - DNA, 20 bp, synthetic construct
  misc_feature 1..20: note = Description of Artificial Sequence: Synthetic oligonucleotide
  misc_feature 1..20: note = Target: ANGPTL4; (+) strand; PAM type: NRG; PAM sequence: GAG
  source 1..20: mol_type = other DNA
ggtggatcatctgacattac

SEQ ID NO: 12511 - DNA, 20 bp, synthetic construct
  misc_feature 1..20: note = Description of Artificial Sequence: Synthetic oligonucleotide
  misc_feature 1..20: note = Target: ANGPTL4; (+) strand; PAM type: NRG; PAM sequence: CAG
  source 1..20: mol_type = other DNA
tcatctgacattacgagttc

SEQ ID NO: 12512 - DNA, 20 bp, synthetic construct
  misc_feature 1..20: note = Description of Artificial Sequence: Synthetic oligonucleotide
  misc_feature 1..20: note = Target: ANGPTL4; (+) strand; PAM type: NRG; PAM sequence: AGG
  source 1..20: mol_type = other DNA
catctgacattacgagttcc

SEQ ID NO: 12513 - DNA, 20 bp, synthetic construct
  misc_feature 1..20: note = Description of Artificial Sequence: Synthetic oligonucleotide
  misc_feature 1..20: note = Target: ANGPTL4; (+) strand; PAM type: NRG; PAM sequence: TGG
  source 1..20: mol_type = other DNA
ccaggcccgcctgaccaaca

SEQ ID NO: 12514 - DNA, 20 bp, synthetic construct
  misc_feature 1..20: note = Description of Artificial Sequence: Synthetic oligonucleotide
  misc_feature 1..20: note = Target: ANGPTL4; (+) strand; PAM type: NRG; PAM sequence: TAG
  source 1..20: mol_type = other DNA
tctactaaaaatacaaaaat

SEQ ID NO: 12515 - DNA, 20 bp, synthetic construct
  misc_feature 1..20: note = Description of Artificial Sequence: Synthetic oligonucleotide
  misc_feature 1..20: note = Target: ANGPTL4; (+) strand; PAM type: NRG; PAM sequence: CGG
  source 1..20: mol_type = other DNA
ctaaaaatacaaaaattagc

SEQ ID NO: 12516 - DNA, 20 bp, synthetic construct
  misc_feature 1..20: note = Description of Artificial Sequence: Synthetic oligonucleotide
  misc_feature 1..20: note = Target: ANGPTL4; (+) strand; PAM type: NRG; PAM sequence: GGG
  source 1..20: mol_type = other DNA
taaaaatacaaaaattagcc

SEQ ID NO: 12517 - DNA, 20 bp, synthetic construct
  misc_feature 1..20: note = Description of Artificial Sequence: Synthetic oligonucleotide
  misc_feature 1..20: note = Target: ANGPTL4; (+) strand; PAM type: NRG; PAM sequence: TGG
  source 1..20: mol_type = other DNA
atacaaaaattagccgggtg

SEQ ID NO: 12518 - DNA, 20 bp, synthetic construct
  misc_feature 1..20: note = Description of Artificial Sequence: Synthetic oligonucleotide
  misc_feature 1..20: note = Target: ANGPTL4; (+) strand; PAM type: NRG; PAM sequence: TGG
  source 1..20: mol_type = other DNA
caaaaattagccgggtgtgg

SEQ ID NO: 12519 - DNA, 20 bp, synthetic construct
  misc_feature 1..20: note = Description of Artificial Sequence: Synthetic oligonucleotide
  misc_feature 1..20: note = Target: ANGPTL4; (+) strand; PAM type: NRG; PAM sequence: CGG
  source 1..20: mol_type = other DNA
aaattagccgggtgtggtgg

SEQ ID NO: 12520 - DNA, 20 bp, synthetic construct
  misc_feature 1..20: note = Description of Artificial Sequence: Synthetic oligonucleotide
  misc_feature 1..20: note = Target: ANGPTL4; (+) strand; PAM type: NRG; PAM sequence: GGG
  source 1..20: mol_type = other DNA
aattagccgggtgtggtggc

SEQ ID NO: 12521 - DNA, 20 bp, synthetic construct
  misc_feature 1..20: note = Description of Artificial Sequence: Synthetic oligonucleotide
  misc_feature 1..20: note = Target: ANGPTL4; (+) strand; PAM type: NRG; PAM sequence: CAG
  source 1..20: mol_type = other DNA
gtggcgggtgcctgtaatcc

SEQ ID NO: 12522 - DNA, 20 bp, synthetic construct
  misc_feature 1..20: note = Description of Artificial Sequence: Synthetic oligonucleotide
  misc_feature 1..20: note = Target: ANGPTL4; (+) strand; PAM type: NRG; PAM sequence: CAG
  source 1..20: mol_type = other DNA
tgcctgtaatcccagctact

SEQ ID NO: 12523 - DNA, 20 bp, synthetic construct
  misc_feature 1..20: note = Description of Artificial Sequence: Synthetic oligonucleotide
  misc_feature 1..20: note = Target: ANGPTL4; (+) strand; PAM type: NRG; PAM sequence: AGG
  source 1..20: mol_type = other DNA
gcctgtaatcccagctactc

SEQ ID NO: 12524 - DNA, 20 bp, synthetic construct
  misc_feature 1..20: note = Description of Artificial Sequence: Synthetic oligonucleotide
  misc_feature 1..20: note = Target: ANGPTL4; (+) strand; PAM type: NRG; PAM sequence: GAG
  source 1..20: mol_type = other DNA
ctgtaatcccagctactcag

SEQ ID NO: 12525 - DNA, 20 bp, synthetic construct
  misc_feature 1..20: note = Description of Artificial Sequence: Synthetic oligonucleotide
  misc_feature 1..20: note = Target: ANGPTL4; (+) strand; PAM type: NRG; PAM sequence: AGG
  source 1..20: mol_type = other DNA
tgtaatcccagctactcagg

SEQ ID NO: 12526 - DNA, 20 bp, synthetic construct
  misc_feature 1..20: note = Description of Artificial Sequence: Synthetic oligonucleotide
  misc_feature 1..20: note = Target: ANGPTL4; (+) strand; PAM type: NRG; PAM sequence: GAG
  source 1..20: mol_type = other DNA
tcccagctactcaggaggct

SEQ ID NO: 12527 - DNA, 20 bp, synthetic construct
  misc_feature 1..20: note = Description of Artificial Sequence: Synthetic oligonucleotide
  misc_feature 1..20: note = Target: ANGPTL4; (+) strand; PAM type: NRG; PAM sequence: AGG
  source 1..20: mol_type = other DNA
cccagctactcaggaggctg

SEQ ID NO: 12528 - DNA, 20 bp, synthetic construct
  misc_feature 1..20: note = Description of Artificial Sequence: Synthetic oligonucleotide
  misc_feature 1..20: note = Target: ANGPTL4; (+) strand; PAM type: NRG; PAM sequence: CAG
  source 1..20: mol_type = other DNA
agctactcaggaggctgagg

SEQ ID NO: 12529 - DNA, 20 bp, synthetic construct
  misc_feature 1..20: note = Description of Artificial Sequence: Synthetic oligonucleotide
  misc_feature 1..20: note = Target: ANGPTL4; (+) strand; PAM type: NRG; PAM sequence: AGG
  source 1..20: mol_type = other DNA
gctactcaggaggctgaggc

SEQ ID NO: 12530 - DNA, 20 bp, synthetic construct
  misc_feature 1..20: note = Description of Artificial Sequence: Synthetic oligonucleotide
  misc_feature 1..20: note = Target: ANGPTL4; (+) strand; PAM type: NRG; PAM sequence: GAG
  source 1..20: mol_type = other DNA
tactcaggaggctgaggcag

SEQ ID NO: 12531 - DNA, 20 bp, synthetic construct
  misc_feature 1..20: note = Description of Artificial Sequence: Synthetic oligonucleotide
  misc_feature 1..20: note = Target: ANGPTL4; (+) strand; PAM type: NRG; PAM sequence: CGG
  source 1..20: mol_type = other DNA
gcaggagaatcacttgaact

SEQ ID NO: 12532 - DNA, 20 bp, synthetic construct
  misc_feature 1..20: note = Description of Artificial Sequence: Synthetic oligonucleotide
  misc_feature 1..20: note = Target: ANGPTL4; (+) strand; PAM type: NRG; PAM sequence: GGG
  source 1..20: mol_type = other DNA
caggagaatcacttgaactc

SEQ ID NO: 12533 - DNA, 20 bp, synthetic construct
  misc_feature 1..20: note = Description of Artificial Sequence: Synthetic oligonucleotide
  misc_feature 1..20: note = Target: ANGPTL4; (+) strand; PAM type: NRG; PAM sequence: GAG
  source 1..20: mol_type = other DNA
ggagaatcacttgaactcgg

SEQ ID NO: 12534 - DNA, 20 bp, synthetic construct
  misc_feature 1..20: note = Description of Artificial Sequence: Synthetic oligonucleotide
  misc_feature 1..20: note = Target: ANGPTL4; (+) strand; PAM type: NRG; PAM sequence: AGG
  source 1..20: mol_type = other DNA
gagaatcacttgaactcggg

SEQ ID NO: 12535 - DNA, 20 bp, synthetic construct
  misc_feature 1..20: note = Description of Artificial Sequence: Synthetic oligonucleotide
  misc_feature 1..20: note = Target: ANGPTL4; (+) strand; PAM type: NRG; PAM sequence: TGG
  source 1..20: mol_type = other DNA
aatcacttgaactcgggagg

SEQ ID NO: 12536 - DNA, 20 bp, synthetic construct
  misc_feature 1..20: note = Description of Artificial Sequence: Synthetic oligonucleotide
  misc_feature 1..20: note = Target: ANGPTL4; (+) strand; PAM type: NRG; PAM sequence: GAG
  source 1..20: mol_type = other DNA
tcacttgaactcgggaggtg

SEQ ID NO: 12537 - DNA, 20 bp, synthetic construct
  misc_feature 1..20: note = Description of Artificial Sequence: Synthetic oligonucleotide
  misc_feature 1..20: note = Target: ANGPTL4; (+) strand; PAM type: NRG; PAM sequence: AGG
  source 1..20: mol_type = other DNA
cacttgaactcgggaggtgg

SEQ ID NO: 12538 - DNA, 20 bp, synthetic construct
  misc_feature 1..20: note = Description of Artificial Sequence: Synthetic oligonucleotide
  misc_feature 1..20: note = Target: ANGPTL4; (+) strand; PAM type: NRG; PAM sequence: CGG
  source 1..20: mol_type = other DNA
aactcgggaggtggaggttg

SEQ ID NO: 12539 - DNA, 20 bp, synthetic construct
  misc_feature 1..20: note = Description of Artificial Sequence: Synthetic oligonucleotide
  misc_feature 1..20: note = Target: ANGPTL4; (+) strand; PAM type: NRG; PAM sequence: GAG
  source 1..20: mol_type = other DNA
cgggaggtggaggttgcggt

SEQ ID NO: 12540 - DNA, 20 bp, synthetic construct
  misc_feature 1..20: note = Description of Artificial Sequence: Synthetic oligonucleotide
  misc_feature 1..20: note = Target: ANGPTL4; (+) strand; PAM type: NRG; PAM sequence: CAG
  source 1..20: mol_type = other DNA
gaggtggaggttgcggtgag

SEQ ID NO: 12541 - DNA, 20 bp, synthetic construct
  misc_feature 1..20: note = Description of Artificial Sequence: Synthetic oligonucleotide
  misc_feature 1..20: note = Target: ANGPTL4; (+) strand; PAM type: NRG; PAM sequence: GAG
  source 1..20: mol_type = other DNA
ggtggaggttgcggtgagca

SEQ ID NO: 12542 - DNA, 20 bp, synthetic construct
  misc_feature 1..20: note = Description of Artificial Sequence: Synthetic oligonucleotide
  misc_feature 1..20: note = Target: ANGPTL4; (+) strand; PAM type: NRG; PAM sequence: CAG
  source 1..20: mol_type = other DNA
gagatcatgccactgcactc

SEQ ID NO: 12543 - DNA, 20 bp, synthetic construct
  misc_feature 1..20: note = Description of Artificial Sequence: Synthetic oligonucleotide
  misc_feature 1..20: note = Target: ANGPTL4; (+) strand; PAM type: NRG; PAM sequence: TGG
  source 1..20: mol_type = other DNA
catgccactgcactccagcc

SEQ ID NO: 12544 - DNA, 20 bp, synthetic construct
  misc_feature 1..20: note = Description of Artificial Sequence: Synthetic oligonucleotide
  misc_feature 1..20: note = Target: ANGPTL4; (+) strand; PAM type: NRG; PAM sequence: GGG
  source 1..20: mol_type = other DNA
atgccactgcactccagcct

SEQ ID NO: 12545 - DNA, 20 bp, synthetic construct
  misc_feature 1..20: note = Description of Artificial Sequence: Synthetic oligonucleotide
  misc_feature 1..20: note = Target: ANGPTL4; (+) strand; PAM type: NRG; PAM sequence: CAG
  source 1..20: mol_type = other DNA
ctgcactccagcctgggtga

SEQ ID NO: 12546 - DNA, 20 bp, synthetic construct
  misc_feature 1..20: note = Description of Artificial Sequence: Synthetic oligonucleotide
  misc_feature 1..20: note = Target: ANGPTL4; (+) strand; PAM type: NRG; PAM sequence: GAG
  source 1..20: mol_type = other DNA
gcactccagcctgggtgaca

SEQ ID NO: 12547 - DNA, 20 bp, synthetic construct
  misc_feature 1..20: note = Description of Artificial Sequence: Synthetic oligonucleotide
  misc_feature 1..20: note = Target: ANGPTL4; (+) strand; PAM type: NRG; PAM sequence: AAG
  source 1..20: mol_type = other DNA
tccagcctgggtgacagagc

SEQ ID NO: 12548 - DNA, 20 bp, synthetic construct
  misc_feature 1..20: note = Description of Artificial Sequence: Synthetic oligonucleotide
  misc_feature 1..20: note = Target: ANGPTL4; (+) strand; PAM type: NRG; PAM sequence: AAG
  source 1..20: mol_type = other DNA
aaaaaaaaaaaaaaaaaaaa

SEQ ID NO: 12549 - DNA, 20 bp, synthetic construct
  misc_feature 1..20: note = Description of Artificial Sequence: Synthetic oligonucleotide
  misc_feature 1..20: note = Target: ANGPTL4; (+) strand; PAM type: NRG; PAM sequence: TAG
  source 1..20: mol_type = other DNA
aaaaaaaaaaaaaaaaagaa

SEQ ID NO: 12550 - DNA, 20 bp, synthetic construct
  misc_feature 1..20: note = Description of Artificial Sequence: Synthetic oligonucleotide
  misc_feature 1..20: note = Target: ANGPTL4; (+) strand; PAM type: NRG; PAM sequence: AGG
  source 1..20: mol_type = other DNA
aaaaaaaaaaaaaaaagaat

SEQ ID NO: 12551 - DNA, 20 bp, synthetic construct
  misc_feature 1..20: note = Description of Artificial Sequence: Synthetic oligonucleotide
  misc_feature 1..20: note = Target: ANGPTL4; (+) strand; PAM type: NRG; PAM sequence: GGG
  source 1..20: mol_type = other DNA
aaaaaaaaaaaaaaagaata

SEQ ID NO: 12552 - DNA, 20 bp, synthetic construct
  misc_feature 1..20: note = Description of Artificial Sequence: Synthetic oligonucleotide
  misc_feature 1..20: note = Target: ANGPTL4; (+) strand; PAM type: NRG; PAM sequence: TGG
  source 1..20: mol_type = other DNA
aaaaaaaaaaagaatagggc

SEQ ID NO: 12553 - DNA, 20 bp, synthetic construct
  misc_feature 1..20: note = Description of Artificial Sequence: Synthetic oligonucleotide
  misc_feature 1..20: note = Target: ANGPTL4; (+) strand; PAM type: NRG; PAM sequence: GGG
  source 1..20: mol_type = other DNA
aaaaaaaaaagaatagggct

SEQ ID NO: 12554 - DNA, 20 bp, synthetic construct
  misc_feature 1..20: note = Description of Artificial Sequence: Synthetic oligonucleotide
  misc_feature 1..20: note = Target: ANGPTL4; (+) strand; PAM type: NRG; PAM sequence: TGG
  source 1..20: mol_type = other DNA
aagaatagggctgggcgcat

SEQ ID NO: 12555 - DNA, 20 bp, synthetic construct
  misc_feature 1..20: note = Description of Artificial Sequence: Synthetic oligonucleotide
  misc_feature 1..20: note = Target: ANGPTL4; (+) strand; PAM type: NRG; PAM sequence: TAG
  source 1..20: mol_type = other DNA
ttggctcacacttgtaacac

SEQ ID NO: 12556 - DNA, 20 bp, synthetic construct
  misc_feature 1..20: note = Description of Artificial Sequence: Synthetic oligonucleotide
  misc_feature 1..20: note = Target: ANGPTL4; (+) strand; PAM type: NRG; PAM sequence: TGG
  source 1..20: mol_type = other DNA
cacttgtaacactagcactt

SEQ ID NO: 12557 - DNA, 20 bp, synthetic construct
  misc_feature 1..20: note = Description of Artificial Sequence: Synthetic oligonucleotide
  misc_feature 1..20: note = Target: ANGPTL4; (+) strand; PAM type: NRG; PAM sequence: GGG
  source 1..20: mol_type = other DNA
acttgtaacactagcacttt

SEQ ID NO: 12558 - DNA, 20 bp, synthetic construct
  misc_feature 1..20: note = Description of Artificial Sequence: Synthetic oligonucleotide
  misc_feature 1..20: note = Target: ANGPTL4; (+) strand; PAM type: NRG; PAM sequence: GAG
  source 1..20: mol_type = other DNA
ttgtaacactagcactttgg

SEQ ID NO: 12559 - DNA, 20 bp, synthetic construct
  misc_feature 1..20: note = Description of Artificial Sequence: Synthetic oligonucleotide
  misc_feature 1..20: note = Target: ANGPTL4; (+) strand; PAM type: NRG; PAM sequence: AGG
  source 1..20: mol_type = other DNA
tgtaacactagcactttggg

SEQ ID NO: 12560 - DNA, 20 bp, synthetic construct
  misc_feature 1..20: note = Description of Artificial Sequence: Synthetic oligonucleotide
  misc_feature 1..20: note = Target: ANGPTL4; (+) strand; PAM type: NRG; PAM sequence: GAG
  source 1..20: mol_type = other DNA
tagcactttgggaggccaac

SEQ ID NO: 12561 - DNA, 20 bp, synthetic construct
  misc_feature 1..20: note = Description of Artificial Sequence: Synthetic oligonucleotide
  misc_feature 1..20: note = Target: ANGPTL4; (+) strand; PAM type: NRG; PAM sequence: CGG
  source 1..20: mol_type = other DNA
cactttgggaggccaacgag

SEQ ID NO: 12562 - DNA, 20 bp, synthetic construct
  misc_feature 1..20: note = Description of Artificial Sequence: Synthetic oligonucleotide
  misc_feature 1..20: note = Target: ANGPTL4; (+) strand; PAM type: NRG; PAM sequence: GAG
  source 1..20: mol_type = other DNA
ggccaacgagcggatcaccc

SEQ ID NO: 12563 - DNA, 20 bp, synthetic construct
  misc_feature 1..20: note = Description of Artificial Sequence: Synthetic oligonucleotide
  misc_feature 1..20: note = Target: ANGPTL4; (+) strand; PAM type: NRG; PAM sequence: AGG
  source 1..20: mol_type = other DNA
gccaacgagcggatcacccg

SEQ ID NO: 12564 - DNA, 20 bp, synthetic construct
  misc_feature 1..20: note = Description of Artificial Sequence: Synthetic oligonucleotide
  misc_feature 1..20: note = Target: ANGPTL4; (+) strand; PAM type: NRG; PAM sequence: CGG
  source 1..20: mol_type = other DNA
acgagcggatcacccgaggt

SEQ ID NO: 12565 - DNA, 20 bp, synthetic construct
  misc_feature 1..20: note = Description of Artificial Sequence: Synthetic oligonucleotide
  misc_feature 1..20: note = Target: ANGPTL4; (+) strand; PAM type: NRG; PAM sequence: GGG
  source 1..20: mol_type = other DNA
cgagcggatcacccgaggtc

SEQ ID NO: 12566 - DNA, 20 bp, synthetic construct
  misc_feature 1..20: note = Description of Artificial Sequence: Synthetic oligonucleotide
  misc_feature 1..20: note = Target: ANGPTL4; (+) strand; PAM type: NRG; PAM sequence: TAG
  source 1..20: mol_type = other DNA
tcccgctgtattgctctata

SEQ ID NO: 12567 - DNA, 20 bp, synthetic construct
  misc_feature 1..20: note = Description of Artificial Sequence: Synthetic oligonucleotide
  misc_feature 1..20: note = Target: ANGPTL4; (+) strand; PAM type: NRG; PAM sequence: GAG
  source 1..20: mol_type = other DNA
gctgtattgctctatatagt

SEQ ID NO: 12568 - DNA, 20 bp, synthetic construct
  misc_feature 1..20: note = Description of Artificial Sequence: Synthetic oligonucleotide
  misc_feature 1..20: note = Target: ANGPTL4; (+) strand; PAM type: NRG; PAM sequence: TAG
  source 1..20: mol_type = other DNA
tatatagtgagatccctata

SEQ ID NO: 12569 - DNA, 20 bp, synthetic construct
  misc_feature 1..20: note = Description of Artificial Sequence: Synthetic oligonucleotide
  misc_feature 1..20: note = Target: ANGPTL4; (+) strand; PAM type: NRG; PAM sequence: AGG
  source 1..20: mol_type = other DNA
atatagtgagatccctatat

SEQ ID NO: 12570 - DNA, 20 bp, synthetic construct
  misc_feature 1..20: note = Description of Artificial Sequence: Synthetic oligonucleotide
  misc_feature 1..20: note = Target: ANGPTL4; (+) strand; PAM type: NRG; PAM sequence: GGG
  source 1..20: mol_type = other DNA
tatagtgagatccctatata

SEQ ID NO: 12571 - DNA, 20 bp, synthetic construct
  misc_feature 1..20: note = Description of Artificial Sequence: Synthetic oligonucleotide
  misc_feature 1..20: note = Target: ANGPTL4; (+) strand; PAM type: NRG; PAM sequence: CAG
  source 1..20: mol_type = other DNA
tagggtctcactctattgtc

SEQ ID NO: 12572 - DNA, 20 bp, synthetic construct
  misc_feature 1..20: note = Description of Artificial Sequence: Synthetic oligonucleotide
  misc_feature 1..20: note = Target: ANGPTL4; (+) strand; PAM type: NRG; PAM sequence: AGG
  source 1..20: mol_type = other DNA
agggtctcactctattgtcc

SEQ ID NO: 12573 - DNA, 20 bp, synthetic construct
  misc_feature 1..20: note = Description of Artificial Sequence: Synthetic oligonucleotide
  misc_feature 1..20: note = Target: ANGPTL4; (+) strand; PAM type: NRG; PAM sequence: TGG
  source 1..20: mol_type = other DNA
tctcactctattgtccaggc

SEQ ID NO: 12574 - DNA, 20 bp, synthetic construct
  misc_feature 1..20: note = Description of Artificial Sequence: Synthetic oligonucleotide
  misc_feature 1..20: note = Target: ANGPTL4; (+) strand; PAM type: NRG; PAM sequence: TGG
  source 1..20: mol_type = other DNA
ctctattgtccaggctggtc

SEQ ID NO: 12575 - DNA, 20 bp, synthetic construct
  misc_feature 1..20: note = Description of Artificial Sequence: Synthetic oligonucleotide
  misc_feature 1..20: note = Target: ANGPTL4; (+) strand; PAM type: NRG; PAM sequence: TGG
  source 1..20: mol_type = other DNA
ttgtccaggctggtctggcc

SEQ ID NO: 12576 - DNA, 20 bp, synthetic construct
  misc_feature 1..20: note = Description of Artificial Sequence: Synthetic oligonucleotide
  misc_feature 1..20: note = Target: ANGPTL4; (+) strand; PAM type: NRG; PAM sequence: TGG
  source 1..20: mol_type = other DNA
ctggtctggcctggccaatg

SEQ ID NO: 12577 - DNA, 20 bp, synthetic construct
  misc_feature 1..20: note = Description of Artificial Sequence: Synthetic oligonucleotide
  misc_feature 1..20: note = Target: ANGPTL4; (+) strand; PAM type: NRG; PAM sequence: TAG
  source 1..20: mol_type = other DNA
tctactaaaaatacaaaaat

SEQ ID NO: 12578 - DNA, 20 bp, synthetic construct
  misc_feature 1..20: note = Description of Artificial Sequence: Synthetic oligonucleotide
  misc_feature 1..20: note = Target: ANGPTL4; (+) strand; PAM type: NRG; PAM sequence: TGG
  source 1..20: mol_type = other DNA
ctaaaaatacaaaaattagc

SEQ ID NO: 12579 - DNA, 20 bp, synthetic construct
  misc_feature 1..20: note = Description of Artificial Sequence: Synthetic oligonucleotide
  misc_feature 1..20: note = Target: ANGPTL4; (+) strand; PAM type: NRG; PAM sequence: GGG
  source 1..20: mol_type = other DNA
taaaaatacaaaaattagct

SEQ ID NO: 12580 - DNA, 20 bp, synthetic construct
  misc_feature 1..20: note = Description of Artificial Sequence: Synthetic oligonucleotide
  misc_feature 1..20: note = Target: ANGPTL4; (+) strand; PAM type: NRG; PAM sequence: TAG
  source 1..20: mol_type = other DNA
atacaaaaattagctgggca

SEQ ID NO: 12581 - DNA, 20 bp, synthetic construct
  misc_feature 1..20: note = Description of Artificial Sequence: Synthetic oligonucleotide
  misc_feature 1..20: note = Target: ANGPTL4; (+) strand; PAM type: NRG; PAM sequence: CAG
  source 1..20: mol_type = other DNA
gtgatgcgcacctataatcc

SEQ ID NO: 12582 - DNA, 20 bp, synthetic construct
  misc_feature 1..20: note = Description of Artificial Sequence: Synthetic oligonucleotide
  misc_feature 1..20: note = Target: ANGPTL4; (+) strand; PAM type: NRG; PAM sequence: CAG
  source 1..20: mol_type = other DNA
cacctataatcccagctact

SEQ ID NO: 12583 - DNA, 20 bp, synthetic construct
  misc_feature 1..20: note = Description of Artificial Sequence: Synthetic oligonucleotide
  misc_feature 1..20: note = Target: ANGPTL4; (+) strand; PAM type: NRG; PAM sequence: AGG
  source 1..20: mol_type = other DNA
acctataatcccagctactc

SEQ ID NO: 12584 - DNA, 20 bp, synthetic construct
  misc_feature 1..20: note = Description of Artificial Sequence: Synthetic oligonucleotide
  misc_feature 1..20: note = Target: ANGPTL4; (+) strand; PAM type: NRG; PAM sequence: GAG
  source 1..20: mol_type = other DNA
ctataatcccagctactcag

SEQ ID NO: 12585 - DNA, 20 bp, synthetic construct
  misc_feature 1..20: note = Description of Artificial Sequence: Synthetic oligonucleotide
  misc_feature 1..20: note = Target: ANGPTL4; (+) strand; PAM type: NRG; PAM sequence: AGG
  source 1..20: mol_type = other DNA
tataatcccagctactcagg

SEQ ID NO: 12586 - DNA, 20 bp, synthetic construct
  misc_feature 1..20: note = Description of Artificial Sequence: Synthetic oligonucleotide
  misc_feature 1..20: note = Target: ANGPTL4; (+) strand; PAM type: NRG; PAM sequence: GAG
  source 1..20: mol_type = other DNA
tcccagctactcaggaggct

SEQ ID NO: 12587 - DNA, 20 bp, synthetic construct
  misc_feature 1..20: note = Description of Artificial Sequence: Synthetic oligonucleotide
  misc_feature 1..20: note = Target: ANGPTL4; (+) strand; PAM type: NRG; PAM sequence: AGG
  source 1..20: mol_type = other DNA
cccagctactcaggaggctg

SEQ ID NO: 12588 - DNA, 20 bp, synthetic construct
  misc_feature 1..20: note = Description of Artificial Sequence: Synthetic oligonucleotide
  misc_feature 1..20: note = Target: ANGPTL4; (+) strand; PAM type: NRG; PAM sequence: CGG
  source 1..20: mol_type = other DNA
gctactcaggaggctgaggc

SEQ ID NO: 12589 - DNA, 20 bp, synthetic construct
  misc_feature 1..20: note = Description of Artificial Sequence: Synthetic oligonucleotide
  misc_feature 1..20: note = Target: ANGPTL4; (+) strand; PAM type: NRG; PAM sequence: GAG
  source 1..20: mol_type = other DNA
tactcaggaggctgaggccg

SEQ ID NO: 12590 - DNA, 20 bp, synthetic construct
  misc_feature 1..20: note = Description of Artificial Sequence: Synthetic oligonucleotide
  misc_feature 1..20: note = Target: ANGPTL4; (+) strand; PAM type: NRG; PAM sequence: CAG
  source 1..20: mol_type = other DNA
gccggagaattgcttgaacc

SEQ ID NO: 12591 - DNA, 20 bp, synthetic construct
  misc_feature 1..20: note = Description of Artificial Sequence: Synthetic oligonucleotide
  misc_feature 1..20: note = Target: ANGPTL4; (+) strand; PAM type: NRG; PAM sequence: AGG
  source 1..20: mol_type = other DNA
ccggagaattgcttgaaccc

SEQ ID NO: 12592 - DNA, 20 bp, synthetic construct
  misc_feature 1..20: note = Description of Artificial Sequence: Synthetic oligonucleotide
  misc_feature 1..20: note = Target: ANGPTL4; (+) strand; PAM type: NRG; PAM sequence: GAG
  source 1..20: mol_type = other DNA
ggagaattgcttgaacccag

SEQ ID NO: 12593 - DNA, 20 bp, synthetic construct
  misc_feature 1..20: note = Description of Artificial Sequence: Synthetic oligonucleotide
  misc_feature 1..20: note = Target: ANGPTL4; (+) strand; PAM type: NRG; PAM sequence: AGG
  source 1..20: mol_type = other DNA
gagaattgcttgaacccagg

SEQ ID NO: 12594 - DNA, 20 bp, synthetic construct
  misc_feature 1..20: note = Description of Artificial Sequence: Synthetic oligonucleotide
  misc_feature 1..20: note = Target: ANGPTL4; (+) strand; PAM type: NRG; PAM sequence: TGG
  source 1..20: mol_type = other DNA
aattgcttgaacccaggagg

SEQ ID NO: 12595 - DNA, 20 bp, synthetic construct
  misc_feature 1..20: note = Description of Artificial Sequence: Synthetic oligonucleotide
  misc_feature 1..20: note = Target: ANGPTL4; (+) strand; PAM type: NRG; PAM sequence: GAG
  source 1..20: mol_type = other DNA
ttgcttgaacccaggaggtg

SEQ ID NO: 12596 - DNA, 20 bp, synthetic construct
  misc_feature 1..20: note = Description of Artificial Sequence: Synthetic oligonucleotide
  misc_feature 1..20: note = Target: ANGPTL4; (+) strand; PAM type: NRG; PAM sequence: AGG
  source 1..20: mol_type = other DNA
tgcttgaacccaggaggtgg

SEQ ID NO: 12597 - DNA, 20 bp, synthetic construct
  misc_feature 1..20: note = Description of Artificial Sequence: Synthetic oligonucleotide
  misc_feature 1..20: note = Target: ANGPTL4; (+) strand; PAM type: NRG; PAM sequence: CAG
  source 1..20: mol_type = other DNA
aacccaggaggtggaggttg

SEQ ID NO: 12598 - DNA, 20 bp, synthetic construct
  misc_feature 1..20: note = Description of Artificial Sequence: Synthetic oligonucleotide
  misc_feature 1..20: note = Target: ANGPTL4; (+) strand; PAM type: NRG; PAM sequence: GAG
  source 1..20: mol_type = other DNA
caggaggtggaggttgcagt

SEQ ID NO: 12599 - DNA, 20 bp, synthetic construct
  misc_feature 1..20: note = Description of Artificial Sequence: Synthetic oligonucleotide
  misc_feature 1..20: note = Target: ANGPTL4; (+) strand; PAM type: NRG; PAM sequence: GAG
  source 1..20: mol_type = other DNA
ggtggaggttgcagtgagcc

SEQ ID NO: 12600 - DNA, 20 bp, synthetic construct
  misc_feature 1..20: note = Description of Artificial Sequence: Synthetic oligonucleotide
  misc_feature 1..20: note = Target: ANGPTL4; (+) strand; PAM type: NRG; PAM sequence: TGG
  source 1..20: mol_type = other DNA
gaggttgcagtgagccgaga

SEQ ID NO: 12601 - DNA, 20 bp, synthetic construct
  misc_feature 1..20: note = Description of Artificial Sequence: Synthetic oligonucleotide
  misc_feature 1..20: note = Target: ANGPTL4; (+) strand; PAM type: NRG; PAM sequence: GAG
  source 1..20: mol_type = other DNA
cagtgagccgagatggcgct

SEQ ID NO: 12602 - DNA, 20 bp, synthetic construct
  misc_feature 1..20: note = Description of Artificial Sequence: Synthetic oligonucleotide
  misc_feature 1..20: note = Target: ANGPTL4; (+) strand; PAM type: NRG; PAM sequence: GAG
  source 1..20: mol_type = other DNA
gtgagccgagatggcgctga

SEQ ID NO: 12603 - DNA, 20 bp, synthetic construct
  misc_feature 1..20: note = Description of Artificial Sequence: Synthetic oligonucleotide
  misc_feature 1..20: note = Target: ANGPTL4; (+) strand; PAM type: NRG; PAM sequence: AGG
  source 1..20: mol_type = other DNA
tgagccgagatggcgctgag

SEQ ID NO: 12604 - DNA, 20 bp, synthetic construct
  misc_feature 1..20: note = Description of Artificial Sequence: Synthetic oligonucleotide
  misc_feature 1..20: note = Target: ANGPTL4; (+) strand; PAM type: NRG; PAM sequence: CAG
  source 1..20: mol_type = other DNA
gagatggcgctgagaggtga

SEQ ID NO: 12605 - DNA, 20 bp, synthetic construct
  misc_feature 1..20: note = Description of Artificial Sequence: Synthetic oligonucleotide
  misc_feature 1..20: note = Target: ANGPTL4; (+) strand; PAM type: NRG; PAM sequence: TGG
  source 1..20: mol_type = other DNA
gctgagaggtgacagcgtgc

SEQ ID NO: 12606 - DNA, 20 bp, synthetic construct
  misc_feature 1..20: note = Description of Artificial Sequence: Synthetic oligonucleotide
  misc_feature 1..20: note = Target: ANGPTL4; (+) strand; PAM type: NRG; PAM sequence: CAG
  source 1..20: mol_type = other DNA
gagaggtgacagcgtgctgg

SEQ ID NO: 12607 - DNA, 20 bp, synthetic construct
  misc_feature 1..20: note = Description of Artificial Sequence: Synthetic oligonucleotide
  misc_feature 1..20: note = Target: ANGPTL4; (+) strand; PAM type: NRG; PAM sequence: CAG
  source 1..20: mol_type = other DNA
cagcgtgctggcagtcctca

SEQ ID NO: 12608 - DNA, 20 bp, synthetic construct
  misc_feature 1..20: note = Description of Artificial Sequence: Synthetic oligonucleotide
  misc_feature 1..20: note = Target: ANGPTL4; (+) strand; PAM type: NRG; PAM sequence: TGG
  source 1..20: mol_type = other DNA
ctctctgcgactcctctgcc

SEQ ID NO: 12609 - DNA, 20 bp, synthetic construct
  misc_feature 1..20: note = Description of Artificial Sequence: Synthetic oligonucleotide
  misc_feature 1..20: note = Target: ANGPTL4; (+) strand; PAM type: NRG; PAM sequence: GGG
  source 1..20: mol_type = other DNA
tctctgcgactcctctgcct

SEQ ID NO: 12610 - DNA, 20 bp, synthetic construct
  misc_feature 1..20: note = Description of Artificial Sequence: Synthetic oligonucleotide
  misc_feature 1..20: note = Target: ANGPTL4; (+) strand; PAM type: NRG; PAM sequence: TGG
  source 1..20: mol_type = other DNA
ctctgcctgggctcccactg

SEQ ID NO: 12611 - DNA, 20 bp, synthetic construct
  misc_feature 1..20: note = Description of Artificial Sequence: Synthetic oligonucleotide
  misc_feature 1..20: note = Target: ANGPTL4; (+) strand; PAM type: NRG; PAM sequence: CGG
  source 1..20: mol_type = other DNA
tgcctgggctcccactgtgg

SEQ ID NO: 12612 - DNA, 20 bp, synthetic construct
  misc_feature 1..20: note = Description of Artificial Sequence: Synthetic oligonucleotide
  misc_feature 1..20: note = Target: ANGPTL4; (+) strand; PAM type: NRG; PAM sequence: CAG
  source 1..20: mol_type = other DNA
ctcccactgtggcggcactt

SEQ ID NO: 12613 - DNA, 20 bp, synthetic construct
  misc_feature 1..20: note = Description of Artificial Sequence: Synthetic oligonucleotide
  misc_feature 1..20: note = Target: ANGPTL4; (+) strand; PAM type: NRG; PAM sequence: AGG
  source 1..20: mol_type = other DNA
tcccactgtggcggcacttc

SEQ ID NO: 12614 - DNA, 20 bp, synthetic construct
  misc_feature 1..20: note = Description of Artificial Sequence: Synthetic oligonucleotide
  misc_feature 1..20: note = Target: ANGPTL4; (+) strand; PAM type: NRG; PAM sequence: GAG
  source 1..20: mol_type = other DNA
ccactgtggcggcacttcag

SEQ ID NO: 12615 - DNA, 20 bp, synthetic construct
  misc_feature 1..20: note = Description of Artificial Sequence: Synthetic oligonucleotide
  misc_feature 1..20: note = Target: ANGPTL4; (+) strand; PAM type: NRG; PAM sequence: CAG
  source 1..20: mol_type = other DNA
gcggcacttcaggagccctt

SEQ ID NO: 12616 - DNA, 20 bp, synthetic construct
  misc_feature 1..20: note = Description of Artificial Sequence: Synthetic oligonucleotide
  misc_feature 1..20: note = Target: ANGPTL4; (+) strand; PAM type: NRG; PAM sequence: TGG
  source 1..20: mol_type = other DNA
ttcagcccaccgctgcactg

SEQ ID NO: 12617 - DNA, 20 bp, synthetic construct
  misc_feature 1..20: note = Description of Artificial Sequence: Synthetic oligonucleotide
  misc_feature 1..20: note = Target: ANGPTL4; (+) strand; PAM type: NRG; PAM sequence: GGG
  source 1..20: mol_type = other DNA
tcagcccaccgctgcactgt

SEQ ID NO: 12618 - DNA, 20 bp, synthetic construct
  misc_feature 1..20: note = Description of Artificial Sequence: Synthetic oligonucleotide
  misc_feature 1..20: note = Target: ANGPTL4; (+) strand; PAM type: NRG; PAM sequence: GAG
  source 1..20: mol_type = other DNA
agcccaccgctgcactgtgg

SEQ ID NO: 12619 - DNA, 20 bp, synthetic construct
  misc_feature 1..20: note = Description of Artificial Sequence: Synthetic oligonucleotide
  misc_feature 1..20: note = Target: ANGPTL4; (+) strand; PAM type: NRG; PAM sequence: TGG
  source 1..20: mol_type = other DNA
gcactgtgggagcccctttc

SEQ ID NO: 12620 - DNA, 20 bp, synthetic construct
  misc_feature 1..20: note = Description of Artificial Sequence: Synthetic oligonucleotide
  misc_feature 1..20: note = Target: ANGPTL4; (+) strand; PAM type: NRG; PAM sequence: GGG
  source 1..20: mol_type = other DNA
cactgtgggagcccctttct

SEQ ID NO: 12621 - DNA, 20 bp, synthetic construct
  misc_feature 1..20: note = Description of Artificial Sequence: Synthetic oligonucleotide
  misc_feature 1..20: note = Target: ANGPTL4; (+) strand; PAM type: NRG; PAM sequence: TGG
  source 1..20: mol_type = other DNA
gtgggagcccctttctgggc

SEQ ID NO: 12622 - DNA, 20 bp, synthetic construct
  misc_feature 1..20: note = Description of Artificial Sequence: Synthetic oligonucleotide
  misc_feature 1..20: note = Target: ANGPTL4; (+) strand; PAM type: NRG; PAM sequence: AAG
  source 1..20: mol_type = other DNA
agcccctttctgggctggcc

SEQ ID NO: 12623 - DNA, 20 bp, synthetic construct
  misc_feature 1..20: note = Description of Artificial Sequence: Synthetic oligonucleotide
  misc_feature 1..20: note = Target: ANGPTL4; (+) strand; PAM type: NRG; PAM sequence: AGG
  source 1..20: mol_type = other DNA
gcccctttctgggctggcca

SEQ ID NO: 12624 - DNA, 20 bp, synthetic construct
  misc_feature 1..20: note = Description of Artificial Sequence: Synthetic oligonucleotide
  misc_feature 1..20: note = Target: ANGPTL4; (+) strand; PAM type: NRG; PAM sequence: CGG
  source 1..20: mol_type = other DNA
ctttctgggctggccaaggc

SEQ ID NO: 12625 - DNA, 20 bp, synthetic construct
  misc_feature 1..20: note = Description of Artificial Sequence: Synthetic oligonucleotide
  misc_feature 1..20: note = Target: ANGPTL4; (+) strand; PAM type: NRG; PAM sequence: GAG
  source 1..20: mol_type = other DNA
ttctgggctggccaaggccg

SEQ ID NO: 12626 - DNA, 20 bp, synthetic construct
  misc_feature 1..20: note = Description of Artificial Sequence: Synthetic oligonucleotide
  misc_feature 1..20: note = Target: ANGPTL4; (+) strand; PAM type: NRG; PAM sequence: TGG
  source 1..20: mol_type = other DNA
gggctggccaaggccggagc

SEQ ID NO: 12627 - DNA, 20 bp, synthetic construct
  misc_feature 1..20: note = Description of Artificial Sequence: Synthetic oligonucleotide
  misc_feature 1..20: note = Target: ANGPTL4; (+) strand; PAM type: NRG; PAM sequence: CAG
  source 1..20: mol_type = other DNA
aaggccggagctggctccct

SEQ ID NO: 12628 - DNA, 20 bp, synthetic construct
  misc_feature 1..20: note = Description of Artificial Sequence: Synthetic oligonucleotide
  misc_feature 1..20: note = Target: ANGPTL4; (+) strand; PAM type: NRG; PAM sequence: CAG
  source 1..20: mol_type = other DNA
gagctggctccctcagcttg

SEQ ID NO: 12629 - DNA, 20 bp, synthetic construct
  misc_feature 1..20: note = Description of Artificial Sequence: Synthetic oligonucleotide
  misc_feature 1..20: note = Target: ANGPTL4; (+) strand; PAM type: NRG; PAM sequence: AGG
  source 1..20: mol_type = other DNA
agctggctccctcagcttgc

SEQ ID NO: 12630 - DNA, 20 bp, synthetic construct
  misc_feature 1..20: note = Description of Artificial Sequence: Synthetic oligonucleotide
  misc_feature 1..20: note = Target: ANGPTL4; (+) strand; PAM type: NRG; PAM sequence: GGG
  source 1..20: mol_type = other DNA
gctggctccctcagcttgca

SEQ ID NO: 12631 - DNA, 20 bp, synthetic construct
  misc_feature 1..20: note = Description of Artificial Sequence: Synthetic oligonucleotide
  misc_feature 1..20: note = Target: ANGPTL4; (+) strand; PAM type: NRG; PAM sequence: AAG
  source 1..20: mol_type = other DNA
ggctccctcagcttgcaggg

SEQ ID NO: 12632 - DNA, 20 bp, synthetic construct
  misc_feature 1..20: note = Description of Artificial Sequence: Synthetic oligonucleotide
  misc_feature 1..20: note = Target: ANGPTL4; (+) strand; PAM type: NRG; PAM sequence: TGG
  source 1..20: mol_type = other DNA
cctcagcttgcagggaagtg

SEQ ID NO: 12633 - DNA, 20 bp, synthetic construct
  misc_feature 1..20: note = Description of Artificial Sequence: Synthetic oligonucleotide
  misc_feature 1..20: note = Target: ANGPTL4; (+) strand; PAM type: NRG; PAM sequence: GAG
  source 1..20: mol_type = other DNA
tcagcttgcagggaagtgtg

SEQ ID NO: 12634 - DNA, 20 bp, synthetic construct
  misc_feature 1..20: note = Description of Artificial Sequence: Synthetic oligonucleotide
  misc_feature 1..20: note = Target: ANGPTL4; (+) strand; PAM type: NRG; PAM sequence: AGG
  source 1..20: mol_type = other DNA
cagcttgcagggaagtgtgg

SEQ ID NO: 12635 - DNA, 20 bp, synthetic construct
  misc_feature 1..20: note = Description of Artificial Sequence: Synthetic oligonucleotide
  misc_feature 1..20: note = Target: ANGPTL4; (+) strand; PAM type: NRG; PAM sequence: GGG
  source 1..20: mol_type = other DNA
agcttgcagggaagtgtgga

SEQ ID NO: 12636 - DNA, 20 bp, synthetic construct
  misc_feature 1..20: note = Description of Artificial Sequence: Synthetic oligonucleotide
  misc_feature 1..20: note = Target: ANGPTL4; (+) strand; PAM type: NRG; PAM sequence: GAG
  source 1..20: mol_type = other DNA
cttgcagggaagtgtggagg

SEQ ID NO: 12637 - DNA, 20 bp, synthetic construct
  misc_feature 1..20: note = Description of Artificial Sequence: Synthetic oligonucleotide
  misc_feature 1..20: note = Target: ANGPTL4; (+) strand; PAM type: NRG; PAM sequence: GAG
  source 1..20: mol_type = other DNA
tgcagggaagtgtggaggga

SEQ ID NO: 12638 - DNA, 20 bp, synthetic construct
  misc_feature 1..20: note = Description of Artificial Sequence: Synthetic oligonucleotide
  misc_feature 1..20: note = Target: ANGPTL4; (+) strand; PAM type: NRG; PAM sequence: AGG
  source 1..20: mol_type = other DNA
gcagggaagtgtggagggag

SEQ ID NO: 12639 - DNA, 20 bp, synthetic construct
  misc_feature 1..20: note = Description of Artificial Sequence: Synthetic oligonucleotide
  misc_feature 1..20: note = Target: ANGPTL4; (+) strand; PAM type: NRG; PAM sequence: GAG
  source 1..20: mol_type = other DNA
aagtgtggagggagaggcgc

SEQ ID NO: 12640 - DNA, 20 bp, synthetic construct
  misc_feature 1..20: note = Description of Artificial Sequence: Synthetic oligonucleotide
  misc_feature 1..20: note = Target: ANGPTL4; (+) strand; PAM type: NRG; PAM sequence: CGG
  source 1..20: mol_type = other DNA
gtggagggagaggcgcgagc

SEQ ID NO: 12641 - DNA, 20 bp, synthetic construct
  misc_feature 1..20: note = Description of Artificial Sequence: Synthetic oligonucleotide
  misc_feature 1..20: note = Target: ANGPTL4; (+) strand; PAM type: NRG; PAM sequence: CGG
  source 1..20: mol_type = other DNA
ggagaggcgcgagccggaat

SEQ ID NO: 12642 - DNA, 20 bp, synthetic construct
  misc_feature 1..20: note = Description of Artificial Sequence: Synthetic oligonucleotide
  misc_feature 1..20: note = Target: ANGPTL4; (+) strand; PAM type: NRG; PAM sequence: GGG
  source 1..20: mol_type = other DNA
gagaggcgcgagccggaatc

SEQ ID NO: 12643 - DNA, 20 bp, synthetic construct
  misc_feature 1..20: note = Description of Artificial Sequence: Synthetic oligonucleotide
  misc_feature 1..20: note = Target: ANGPTL4; (+) strand; PAM type: NRG; PAM sequence: GGG
  source 1..20: mol_type = other DNA
agaggcgcgagccggaatcg

SEQ ID NO: 12644 - DNA, 20 bp, synthetic construct
  misc_feature 1..20: note = Description of Artificial Sequence: Synthetic oligonucleotide
  misc_feature 1..20: note = Target: ANGPTL4; (+) strand; PAM type: NRG; PAM sequence: CGG
  source 1..20: mol_type = other DNA
gccggaatcggggctgcgcg

SEQ ID NO: 12645 - DNA, 20 bp, synthetic construct
  misc_feature 1..20: note = Description of Artificial Sequence: Synthetic oligonucleotide
  misc_feature 1..20: note = Target: ANGPTL4; (+) strand; PAM type: NRG; PAM sequence: TGG
  source 1..20: mol_type = other DNA
ggggctgcgcgcggtgcttg

SEQ ID NO: 12646 - DNA, 20 bp, synthetic construct
  misc_feature 1..20: note = Description of Artificial Sequence: Synthetic oligonucleotide
  misc_feature 1..20: note = Target: ANGPTL4; (+) strand; PAM type: NRG; PAM sequence: GGG
  source 1..20: mol_type = other DNA
gggctgcgcgcggtgcttgt

SEQ ID NO: 12647 - DNA, 20 bp, synthetic construct
  misc_feature 1..20: note = Description of Artificial Sequence: Synthetic oligonucleotide
  misc_feature 1..20: note = Target: ANGPTL4; (+) strand; PAM type: NRG; PAM sequence: CAG
  source 1..20: mol_type = other DNA
tgcgcgcggtgcttgtgggc

SEQ ID NO: 12648 - DNA, 20 bp, synthetic construct
  misc_feature 1..20: note = Description of Artificial Sequence: Synthetic oligonucleotide
  misc_feature 1..20: note = Target: ANGPTL4; (+) strand; PAM type: NRG; PAM sequence: TGG
  source 1..20: mol_type = other DNA
cgcggtgcttgtgggccagc

SEQ ID NO: 12649 - DNA, 20 bp, synthetic construct
  misc_feature 1..20: note = Description of Artificial Sequence: Synthetic oligonucleotide
  misc_feature 1..20: note = Target: ANGPTL4; (+) strand; PAM type: NRG; PAM sequence: GAG
  source 1..20: mol_type = other DNA
cggtgcttgtgggccagctg

SEQ ID NO: 12650 - DNA, 20 bp, synthetic construct
  misc_feature 1..20: note = Description of Artificial Sequence: Synthetic oligonucleotide
  misc_feature 1..20: note = Target: ANGPTL4; (+) strand; PAM type: NRG; PAM sequence: CGG
  source 1..20: mol_type = other DNA
ttgtgggccagctggagttc

SEQ ID NO: 12651 - DNA, 20 bp, synthetic construct
  misc_feature 1..20: note = Description of Artificial Sequence: Synthetic oligonucleotide
  misc_feature 1..20: note = Target: ANGPTL4; (+) strand; PAM type: NRG; PAM sequence: GGG
  source 1..20: mol_type = other DNA
tgtgggccagctggagttcc

SEQ ID NO: 12652 - DNA, 20 bp, synthetic construct
  misc_feature 1..20: note = Description of Artificial Sequence: Synthetic oligonucleotide
  misc_feature 1..20: note = Target: ANGPTL4; (+) strand; PAM type: NRG; PAM sequence: TGG
  source 1..20: mol_type = other DNA
gggccagctggagttccggg

SEQ ID NO: 12653 - DNA, 20 bp, synthetic construct
  misc_feature 1..20: note = Description of Artificial Sequence: Synthetic oligonucleotide
  misc_feature 1..20: note = Target: ANGPTL4; (+) strand; PAM type: NRG; PAM sequence: GGG
  source 1..20: mol_type = other DNA
ggccagctggagttccgggt

SEQ ID NO: 12654 - DNA, 20 bp, synthetic construct
  misc_feature 1..20: note = Description of Artificial Sequence: Synthetic oligonucleotide
  misc_feature 1..20: note = Target: ANGPTL4; (+) strand; PAM type: NRG; PAM sequence: TGG
  source 1..20: mol_type = other DNA
gctggagttccgggtgggcg

SEQ ID NO: 12655 - DNA, 20 bp, synthetic construct
  misc_feature 1..20: note = Description of Artificial Sequence: Synthetic oligonucleotide
  misc_feature 1..20: note = Target: ANGPTL4; (+) strand; PAM type: NRG; PAM sequence: GGG
  source 1..20: mol_type = other DNA
ctggagttccgggtgggcgt

SEQ ID NO: 12656 - DNA, 20 bp, synthetic construct
  misc_feature 1..20: note = Description of Artificial Sequence: Synthetic oligonucleotide
  misc_feature 1..20: note = Target: ANGPTL4; (+) strand; PAM type: NRG; PAM sequence: TGG
  source 1..20: mol_type = other DNA
gttccgggtgggcgtgggct

SEQ ID NO: 12657 - DNA, 20 bp, synthetic construct
  misc_feature 1..20: note = Description of Artificial Sequence: Synthetic oligonucleotide
  misc_feature 1..20: note = Target: ANGPTL4; (+) strand; PAM type: NRG; PAM sequence: CGG
  source 1..20: mol_type = other DNA
ccgggtgggcgtgggcttgg

SEQ ID NO: 12658 - DNA, 20 bp, synthetic construct
  misc_feature 1..20: note = Description of Artificial Sequence: Synthetic oligonucleotide
  misc_feature 1..20: note = Target: ANGPTL4; (+) strand; PAM type: NRG; PAM sequence: CAG
  source 1..20: mol_type = other DNA
ggcttggcggaccctgcact

SEQ ID NO: 12659 - DNA, 20 bp, synthetic construct
  misc_feature 1..20: note = Description of Artificial Sequence: Synthetic oligonucleotide
  misc_feature 1..20: note = Target: ANGPTL4; (+) strand; PAM type: NRG; PAM sequence: GAG
  source 1..20: mol_type = other DNA
cttggcggaccctgcactca

SEQ ID NO: 12660 - DNA, 20 bp, synthetic construct
  misc_feature 1..20: note = Description of Artificial Sequence: Synthetic oligonucleotide
  misc_feature 1..20: note = Target: ANGPTL4; (+) strand; PAM type: NRG; PAM sequence: CAG
  source 1..20: mol_type = other DNA
ggcggaccctgcactcagag

SEQ ID NO: 12661 - DNA, 20 bp, synthetic construct
  misc_feature 1..20: note = Description of Artificial Sequence: Synthetic oligonucleotide
  misc_feature 1..20: note = Target: ANGPTL4; (+) strand; PAM type: NRG; PAM sequence: CGG
  source 1..20: mol_type = other DNA
ctgcactcagagcagccgtc

SEQ ID NO: 12662 - DNA, 20 bp, synthetic construct
  misc_feature 1..20: note = Description of Artificial Sequence: Synthetic oligonucleotide
  misc_feature 1..20: note = Target: ANGPTL4; (+) strand; PAM type: NRG; PAM sequence: TGG
  source 1..20: mol_type = other DNA
gagcagccgtccggccctgc

SEQ ID NO: 12663 - DNA, 20 bp, synthetic construct
  misc_feature 1..20: note = Description of Artificial Sequence: Synthetic oligonucleotide
  misc_feature 1..20: note = Target: ANGPTL4; (+) strand; PAM type: NRG; PAM sequence: CGG
  source 1..20: mol_type = other DNA
ccgtccggccctgctggccc

SEQ ID NO: 12664 - DNA, 20 bp, synthetic construct
  misc_feature 1..20: note = Description of Artificial Sequence: Synthetic oligonucleotide
  misc_feature 1..20: note = Target: ANGPTL4; (+) strand; PAM type: NRG; PAM sequence: GGG
  source 1..20: mol_type = other DNA
cgtccggccctgctggcccc

SEQ ID NO: 12665 - DNA, 20 bp, synthetic construct
  misc_feature 1..20: note = Description of Artificial Sequence: Synthetic oligonucleotide
  misc_feature 1..20: note = Target: ANGPTL4; (+) strand; PAM type: NRG; PAM sequence: GAG
  source 1..20: mol_type = other DNA
ccctgctggccccgggcaat

SEQ ID NO: 12666 - DNA, 20 bp, synthetic construct
  misc_feature 1..20: note = Description of Artificial Sequence: Synthetic oligonucleotide
  misc_feature 1..20: note = Target: ANGPTL4; (+) strand; PAM type: NRG; PAM sequence: AGG
  source 1..20: mol_type = other DNA
cctgctggccccgggcaatg

SEQ ID NO: 12667 - DNA, 20 bp, synthetic construct
  misc_feature 1..20: note = Description of Artificial Sequence: Synthetic oligonucleotide
  misc_feature 1..20: note = Target: ANGPTL4; (+) strand; PAM type: NRG; PAM sequence: GGG
  source 1..20: mol_type = other DNA
ctgctggccccgggcaatga

SEQ ID NO: 12668 - DNA, 20 bp, synthetic construct
  misc_feature 1..20: note = Description of Artificial Sequence: Synthetic oligonucleotide
  misc_feature 1..20: note = Target: ANGPTL4; (+) strand; PAM type: NRG; PAM sequence: GGG
  source 1..20: mol_type = other DNA
tgctggccccgggcaatgag

SEQ ID NO: 12669 - DNA, 20 bp, synthetic construct
  misc_feature 1..20: note = Description of Artificial Sequence: Synthetic oligonucleotide
  misc_feature 1..20: note = Target: ANGPTL4; (+) strand; PAM type: NRG; PAM sequence: TAG
  source 1..20: mol_type = other DNA
gccccgggcaatgaggggct

SEQ ID NO: 12670 - DNA, 20 bp, synthetic construct
  misc_feature 1..20: note = Description of Artificial Sequence: Synthetic oligonucleotide
  misc_feature 1..20: note = Target: ANGPTL4; (+) strand; PAM type: NRG; PAM sequence: CGG
  source 1..20: mol_type = other DNA
gcaatgaggggcttagcacc

SEQ ID NO: 12671 - DNA, 20 bp, synthetic construct
  misc_feature 1..20: note = Description of Artificial Sequence: Synthetic oligonucleotide
  misc_feature 1..20: note = Target: ANGPTL4; (+) strand; PAM type: NRG; PAM sequence: GGG
  source 1..20: mol_type = other DNA
caatgaggggcttagcaccc

SEQ ID NO: 12672 - DNA, 20 bp, synthetic construct
  misc_feature 1..20: note = Description of Artificial Sequence: Synthetic oligonucleotide
  misc_feature 1..20: note = Target: ANGPTL4; (+) strand; PAM type: NRG; PAM sequence: CGG
  source 1..20: mol_type = other DNA
gaggggcttagcacccgggc

SEQ ID NO: 12673 - DNA, 20 bp, synthetic construct
  misc_feature 1..20: note = Description of Artificial Sequence: Synthetic oligonucleotide
  misc_feature 1..20: note = Target: ANGPTL4; (+) strand; PAM type: NRG; PAM sequence: CAG
  source 1..20: mol_type = other DNA
ggcttagcacccgggccgga

SEQ ID NO: 12674 - DNA, 20 bp, synthetic construct
  misc_feature 1..20: note = Description of Artificial Sequence: Synthetic oligonucleotide
  misc_feature 1..20: note = Target: ANGPTL4; (+) strand; PAM type: NRG; PAM sequence: CGG
  source 1..20: mol_type = other DNA
ttagcacccgggccggacag

SEQ ID NO: 12675 - DNA, 20 bp, synthetic construct
  misc_feature 1..20: note = Description of Artificial Sequence: Synthetic oligonucleotide
  misc_feature 1..20: note = Target: ANGPTL4; (+) strand; PAM type: NRG; PAM sequence: CGG
  source 1..20: mol_type = other DNA
cccgggccggacagcggctg

SEQ ID NO: 12676 - DNA, 20 bp, synthetic construct
  misc_feature 1..20: note = Description of Artificial Sequence: Synthetic oligonucleotide
  misc_feature 1..20: note = Target: ANGPTL4; (+) strand; PAM type: NRG; PAM sequence: GAG
  source 1..20: mol_type = other DNA
cgggccggacagcggctgcg

SEQ ID NO: 12677 - DNA, 20 bp, synthetic construct
  misc_feature 1..20: note = Description of Artificial Sequence: Synthetic oligonucleotide
  misc_feature 1..20: note = Target: ANGPTL4; (+) strand; PAM type: NRG; PAM sequence: AGG
  source 1..20: mol_type = other DNA
gggccggacagcggctgcgg

SEQ ID NO: 12678 - DNA, 20 bp, synthetic construct
  misc_feature 1..20: note = Description of Artificial Sequence: Synthetic oligonucleotide
  misc_feature 1..20: note = Target: ANGPTL4; (+) strand; PAM type: NRG; PAM sequence: GGG
  source 1..20: mol_type = other DNA
ggccggacagcggctgcgga

SEQ ID NO: 12679 - DNA, 20 bp, synthetic construct
  misc_feature 1..20: note = Description of Artificial Sequence: Synthetic oligonucleotide
  misc_feature 1..20: note = Target: ANGPTL4; (+) strand; PAM type: NRG; PAM sequence: TGG
  source 1..20: mol_type = other DNA
agcggctgcggagggtgtac

SEQ ID NO: 12680 - DNA, 20 bp, synthetic construct
  misc_feature 1..20: note = Description of Artificial Sequence: Synthetic oligonucleotide
  misc_feature 1..20: note = Target: ANGPTL4; (+) strand; PAM type: NRG; PAM sequence: GGG
  source 1..20: mol_type = other DNA
gcggctgcggagggtgtact

SEQ ID NO: 12681 - DNA, 20 bp, synthetic construct
  misc_feature 1..20: note = Description of Artificial Sequence: Synthetic oligonucleotide
  misc_feature 1..20: note = Target: ANGPTL4; (+) strand; PAM type: NRG; PAM sequence: CAG
  source 1..20: mol_type = other DNA
ggagggtgtactgggtcccc

SEQ ID NO: 12682 - DNA, 20 bp, synthetic construct
  misc_feature 1..20: note = Description of Artificial Sequence: Synthetic oligonucleotide
  misc_feature 1..20: note = Target: ANGPTL4; (+) strand; PAM type: NRG; PAM sequence: CAG
  source 1..20: mol_type = other DNA
gggtgtactgggtcccccag

SEQ ID NO: 12683 - DNA, 20 bp, synthetic construct
  misc_feature 1..20: note = Description of Artificial Sequence: Synthetic oligonucleotide
  misc_feature 1..20: note = Target: ANGPTL4; (+) strand; PAM type: NRG; PAM sequence: CAG
  source 1..20: mol_type = other DNA
actgggtcccccagcagtgc

SEQ ID NO: 12684 - DNA, 20 bp, synthetic construct
  misc_feature 1..20: note = Description of Artificial Sequence: Synthetic oligonucleotide
  misc_feature 1..20: note = Target: ANGPTL4; (+) strand; PAM type: NRG; PAM sequence: CGG
  source 1..20: mol_type = other DNA
ccccagcagtgccagcgcac

SEQ ID NO: 12685 - DNA, 20 bp, synthetic construct
  misc_feature 1..20: note = Description of Artificial Sequence: Synthetic oligonucleotide
  misc_feature 1..20: note = Target: ANGPTL4; (+) strand; PAM type: NRG; PAM sequence: CAG
  source 1..20: mol_type = other DNA
cgctgcgcttgatttctcac

SEQ ID NO: 12686 - DNA, 20 bp, synthetic construct
  misc_feature 1..20: note = Description of Artificial Sequence: Synthetic oligonucleotide
  misc_feature 1..20: note = Target: ANGPTL4; (+) strand; PAM type: NRG; PAM sequence: AGG
  source 1..20: mol_type = other DNA
gctgcgcttgatttctcacc

SEQ ID NO: 12687 - DNA, 20 bp, synthetic construct
  misc_feature 1..20: note = Description of Artificial Sequence: Synthetic oligonucleotide
  misc_feature 1..20: note = Target: ANGPTL4; (+) strand; PAM type: NRG; PAM sequence: TAG
  source 1..20: mol_type = other DNA
cttgatttctcaccaggcct

SEQ ID NO: 12688 - DNA, 20 bp, synthetic construct
  misc_feature 1..20: note = Description of Artificial Sequence: Synthetic oligonucleotide
  misc_feature 1..20: note = Target: ANGPTL4; (+) strand; PAM type: NRG; PAM sequence: CGG
  source 1..20: mol_type = other DNA
aggccttagctgccttcccg

SEQ ID NO: 12689 - DNA, 20 bp, synthetic construct
  misc_feature 1..20: note = Description of Artificial Sequence: Synthetic oligonucleotide
  misc_feature 1..20: note = Target: ANGPTL4; (+) strand; PAM type: NRG; PAM sequence: GGG
  source 1..20: mol_type = other DNA
ggccttagctgccttcccgc

SEQ ID NO: 12690 - DNA, 20 bp, synthetic construct
  misc_feature 1..20: note = Description of Artificial Sequence: Synthetic oligonucleotide
  misc_feature 1..20: note = Target: ANGPTL4; (+) strand; PAM type: NRG; PAM sequence: GGG
  source 1..20: mol_type = other DNA
gccttagctgccttcccgcg

SEQ ID NO: 12691 - DNA, 20 bp, synthetic construct
  misc_feature 1..20: note = Description of Artificial Sequence: Synthetic oligonucleotide
  misc_feature 1..20: note = Target: ANGPTL4; (+) strand; PAM type: NRG; PAM sequence: CAG
  source 1..20: mol_type = other DNA
ttagctgccttcccgcgggg

SEQ ID NO: 12692 - DNA, 20 bp, synthetic construct
  misc_feature 1..20: note = Description of Artificial Sequence: Synthetic oligonucleotide
  misc_feature 1..20: note = Target: ANGPTL4; (+) strand; PAM type: NRG; PAM sequence: AGG
  source 1..20: mol_type = other DNA
tagctgccttcccgcggggc

SEQ ID NO: 12693 - DNA, 20 bp, synthetic construct
  misc_feature 1..20: note = Description of Artificial Sequence: Synthetic oligonucleotide
  misc_feature 1..20: note = Target: ANGPTL4; (+) strand; PAM type: NRG; PAM sequence: GGG
  source 1..20: mol_type = other DNA
agctgccttcccgcggggca

SEQ ID NO: 12694 - DNA, 20 bp, synthetic construct
  misc_feature 1..20: note = Description of Artificial Sequence: Synthetic oligonucleotide
  misc_feature 1..20: note = Target: ANGPTL4; (+) strand; PAM type: NRG; PAM sequence: CGG
  source 1..20: mol_type = other DNA
ccttcccgcggggcagggat

SEQ ID NO: 12695 - DNA, 20 bp, synthetic construct
  misc_feature 1..20: note = Description of Artificial Sequence: Synthetic oligonucleotide
  misc_feature 1..20: note = Target: ANGPTL4; (+) strand; PAM type: NRG; PAM sequence: GGG
  source 1..20: mol_type = other DNA
cttcccgcggggcagggatc

SEQ ID NO: 12696 - DNA, 20 bp, synthetic construct
  misc_feature 1..20: note = Description of Artificial Sequence: Synthetic oligonucleotide
  misc_feature 1..20: note = Target: ANGPTL4; (+) strand; PAM type: NRG; PAM sequence: CAG
  source 1..20: mol_type = other DNA
ggggcagggatcgggacctg

SEQ ID NO: 12697 - DNA, 20 bp, synthetic construct
  misc_feature 1..20: note = Description of Artificial Sequence: Synthetic oligonucleotide
  misc_feature 1..20: note = Target: ANGPTL4; (+) strand; PAM type: NRG; PAM sequence: GAG
  source 1..20: mol_type = other DNA
acctgcagcccgccatgcct

SEQ ID NO: 12698 - DNA, 20 bp, synthetic construct
  misc_feature 1..20: note = Description of Artificial Sequence: Synthetic oligonucleotide
  misc_feature 1..20: note = Target: ANGPTL4; (+) strand; PAM type: NRG; PAM sequence: TGG
  source 1..20: mol_type = other DNA
tgagcctcccaccccctcca

SEQ ID NO: 12699 - DNA, 20 bp, synthetic construct
  misc_feature 1..20: note = Description of Artificial Sequence: Synthetic oligonucleotide
  misc_feature 1..20: note = Target: ANGPTL4; (+) strand; PAM type: NRG; PAM sequence: GGG
  source 1..20: mol_type = other DNA
gagcctcccaccccctccat

SEQ ID NO: 12700 - DNA, 20 bp, synthetic construct
  misc_feature 1..20: note = Description of Artificial Sequence: Synthetic oligonucleotide
  misc_feature 1..20: note = Target: ANGPTL4; (+) strand; PAM type: NRG; PAM sequence: CGG
  source 1..20: mol_type = other DNA
cccctccatgggctcctgtg

SEQ ID NO: 12701 - DNA, 20 bp, synthetic construct
  misc_feature 1..20: note = Description of Artificial Sequence: Synthetic oligonucleotide
  misc_feature 1..20: note = Target: ANGPTL4; (+) strand; PAM type: NRG; PAM sequence: GAG
  source 1..20: mol_type = other DNA
gcggcccgcgcctccctgac

SEQ ID NO: 12702 - DNA, 20 bp, synthetic construct
  misc_feature 1..20: note = Description of Artificial Sequence: Synthetic oligonucleotide
  misc_feature 1..20: note = Target: ANGPTL4; (+) strand; PAM type: NRG; PAM sequence: TGG
  source 1..20: mol_type = other DNA
gagcactgccccatgctcca

SEQ ID NO: 12703 - DNA, 20 bp, synthetic construct
  misc_feature 1..20: note = Description of Artificial Sequence: Synthetic oligonucleotide
  misc_feature 1..20: note = Target: ANGPTL4; (+) strand; PAM type: NRG; PAM sequence: CAG
  source 1..20: mol_type = other DNA
gccccatgctccatggtgcc

SEQ ID NO: 12704 - DNA, 20 bp, synthetic construct
  misc_feature 1..20: note = Description of Artificial Sequence: Synthetic oligonucleotide
  misc_feature 1..20: note = Target: ANGPTL4; (+) strand; PAM type: NRG; PAM sequence: AAG
  source 1..20: mol_type = other DNA
cccagtcccatccaccaccc

SEQ ID NO: 12705 - DNA, 20 bp, synthetic construct
  misc_feature 1..20: note = Description of Artificial Sequence: Synthetic oligonucleotide
  misc_feature 1..20: note = Target: ANGPTL4; (+) strand; PAM type: NRG; PAM sequence: AGG
  source 1..20: mol_type = other DNA
ccagtcccatccaccaccca

SEQ ID NO: 12706 - DNA, 20 bp, synthetic construct
  misc_feature 1..20: note = Description of Artificial Sequence: Synthetic oligonucleotide
  misc_feature 1..20: note = Target: ANGPTL4; (+) strand; PAM type: NRG; PAM sequence: GGG
  source 1..20: mol_type = other DNA
cagtcccatccaccacccaa

SEQ ID NO: 12707 - DNA, 20 bp, synthetic construct
  misc_feature 1..20: note = Description of Artificial Sequence: Synthetic oligonucleotide
  misc_feature 1..20: note = Target: ANGPTL4; (+) strand; PAM type: NRG; PAM sequence: GAG
  source 1..20: mol_type = other DNA
ccatccaccacccaagggct

SEQ ID NO: 12708 - DNA, 20 bp, synthetic construct
  misc_feature 1..20: note = Description of Artificial Sequence: Synthetic oligonucleotide
  misc_feature 1..20: note = Target: ANGPTL4; (+) strand; PAM type: NRG; PAM sequence: AGG
  source 1..20: mol_type = other DNA
catccaccacccaagggctg

SEQ ID NO: 12709 - DNA, 20 bp, synthetic construct
  misc_feature 1..20: note = Description of Artificial Sequence: Synthetic oligonucleotide
  misc_feature 1..20: note = Target: ANGPTL4; (+) strand; PAM type: NRG; PAM sequence: GAG
  source 1..20: mol_type = other DNA
tccaccacccaagggctgag

SEQ ID NO: 12710 - DNA, 20 bp, synthetic construct
  misc_feature 1..20: note = Description of Artificial Sequence: Synthetic oligonucleotide
  misc_feature 1..20: note = Target: ANGPTL4; (+) strand; PAM type: NRG; PAM sequence: CAG
  source 1..20: mol_type = other DNA
cacccaagggctgaggagtg

SEQ ID NO: 12711 - DNA, 20 bp, synthetic construct
  misc_feature 1..20: note = Description of Artificial Sequence: Synthetic oligonucleotide
  misc_feature 1..20: note = Target: ANGPTL4; (+) strand; PAM type: NRG; PAM sequence: AGG
  source 1..20: mol_type = other DNA
acccaagggctgaggagtgc

SEQ ID NO: 12712 - DNA, 20 bp, synthetic construct
  misc_feature 1..20: note = Description of Artificial Sequence: Synthetic oligonucleotide
  misc_feature 1..20: note = Target: ANGPTL4; (+) strand; PAM type: NRG; PAM sequence: CGG
  source 1..20: mol_type = other DNA
ggctgaggagtgcaggcgca

SEQ ID NO: 12713 - DNA, 20 bp, synthetic construct
  misc_feature 1..20: note = Description of Artificial Sequence: Synthetic oligonucleotide
  misc_feature 1..20: note = Target: ANGPTL4; (+) strand; PAM type: NRG; PAM sequence: TGG
  source 1..20: mol_type = other DNA
aggagtgcaggcgcacggcg

SEQ ID NO: 12714 - DNA, 20 bp, synthetic construct
  misc_feature 1..20: note = Description of Artificial Sequence: Synthetic oligonucleotide
  misc_feature 1..20: note = Target: ANGPTL4; (+) strand; PAM type: NRG; PAM sequence: GGG
  source 1..20: mol_type = other DNA
ggagtgcaggcgcacggcgt

SEQ ID NO: 12715 - DNA, 20 bp, synthetic construct
  misc_feature 1..20: note = Description of Artificial Sequence: Synthetic oligonucleotide
  misc_feature 1..20: note = Target: ANGPTL4; (+) strand; PAM type: NRG; PAM sequence: TGG
  source 1..20: mol_type = other DNA
gcaggcgcacggcgtgggac

SEQ ID NO: 12716 - DNA, 20 bp, synthetic construct
  misc_feature 1..20: note = Description of Artificial Sequence: Synthetic oligonucleotide
  misc_feature 1..20: note = Target: ANGPTL4; (+) strand; PAM type: NRG; PAM sequence: CAG
  source 1..20: mol_type = other DNA
ggcgcacggcgtgggactgg

SEQ ID NO: 12717 - DNA, 20 bp, synthetic construct
  misc_feature 1..20: note = Description of Artificial Sequence: Synthetic oligonucleotide
  misc_feature 1..20: note = Target: ANGPTL4; (+) strand; PAM type: NRG; PAM sequence: AGG
  source 1..20: mol_type = other DNA
gcgcacggcgtgggactggc

SEQ ID NO: 12718 - DNA, 20 bp, synthetic construct
  misc_feature 1..20: note = Description of Artificial Sequence: Synthetic oligonucleotide
  misc_feature 1..20: note = Target: ANGPTL4; (+) strand; PAM type: NRG; PAM sequence: CAG
  source 1..20: mol_type = other DNA
cacggcgtgggactggcagg

SEQ ID NO: 12719 - DNA, 20 bp, synthetic construct
  misc_feature 1..20: note = Description of Artificial Sequence: Synthetic oligonucleotide
  misc_feature 1..20: note = Target: ANGPTL4; (+) strand; PAM type: NRG; PAM sequence: CAG
  source 1..20: mol_type = other DNA
ctggcaggcagctccacctg

SEQ ID NO: 12720 - DNA, 20 bp, synthetic construct
  misc_feature 1..20: note = Description of Artificial Sequence: Synthetic oligonucleotide
  misc_feature 1..20: note = Target: ANGPTL4; (+) strand; PAM type: NRG; PAM sequence: CGG
  source 1..20: mol_type = other DNA
ggcagctccacctgcagccc

SEQ ID NO: 12721 - DNA, 20 bp, synthetic construct
  misc_feature 1..20: note = Description of Artificial Sequence: Synthetic oligonucleotide
  misc_feature 1..20: note = Target: ANGPTL4; (+) strand; PAM type: NRG; PAM sequence: CAG
  source 1..20: mol_type = other DNA
ctccacctgcagccccggtg

SEQ ID NO: 12722 - DNA, 20 bp, synthetic construct
  misc_feature 1..20: note = Description of Artificial Sequence: Synthetic oligonucleotide
  misc_feature 1..20: note = Target: ANGPTL4; (+) strand; PAM type: NRG; PAM sequence: AGG
  source 1..20: mol_type = other DNA
tccacctgcagccccggtgc

SEQ ID NO: 12723 - DNA, 20 bp, synthetic construct
  misc_feature 1..20: note = Description of Artificial Sequence: Synthetic oligonucleotide
  misc_feature 1..20: note = Target: ANGPTL4; (+) strand; PAM type: NRG; PAM sequence: TGG
  source 1..20: mol_type = other DNA
agccccggtgcaggatccac

SEQ ID NO: 12724 - DNA, 20 bp, synthetic construct
  misc_feature 1..20: note = Description of Artificial Sequence: Synthetic oligonucleotide
  misc_feature 1..20: note = Target: ANGPTL4; (+) strand; PAM type: NRG; PAM sequence: GGG
  source 1..20: mol_type = other DNA
gccccggtgcaggatccact

SEQ ID NO: 12725 - DNA, 20 bp, synthetic construct
  misc_feature 1..20: note = Description of Artificial Sequence: Synthetic oligonucleotide
  misc_feature 1..20: note = Target: ANGPTL4; (+) strand; PAM type: NRG; PAM sequence: AAG
  source 1..20: mol_type = other DNA
ggtgcaggatccactgggtg

SEQ ID NO: 12726 - DNA, 20 bp, synthetic construct
  misc_feature 1..20: note = Description of Artificial Sequence: Synthetic oligonucleotide
  misc_feature 1..20: note = Target: ANGPTL4; (+) strand; PAM type: NRG; PAM sequence: TAG
  source 1..20: mol_type = other DNA
caggatccactgggtgaagc

SEQ ID NO: 12727 - DNA, 20 bp, synthetic construct
  misc_feature 1..20: note = Description of Artificial Sequence: Synthetic oligonucleotide
  misc_feature 1..20: note = Target: ANGPTL4; (+) strand; PAM type: NRG; PAM sequence: TGG
  source 1..20: mol_type = other DNA
atccactgggtgaagctagc

SEQ ID NO: 12728 - DNA, 20 bp, synthetic construct
  misc_feature 1..20: note = Description of Artificial Sequence: Synthetic oligonucleotide
  misc_feature 1..20: note = Target: ANGPTL4; (+) strand; PAM type: NRG; PAM sequence: GGG
  source 1..20: mol_type = other DNA
tccactgggtgaagctagct

SEQ ID NO: 12729 - DNA, 20 bp, synthetic construct
  misc_feature 1..20: note = Description of Artificial Sequence: Synthetic oligonucleotide
  misc_feature 1..20: note = Target: ANGPTL4; (+) strand; PAM type: NRG; PAM sequence: GAG
  source 1..20: mol_type = other DNA
gtgaagctagctgggctcct

SEQ ID NO: 12730 - DNA, 20 bp, synthetic construct
  misc_feature 1..20: note = Description of Artificial Sequence: Synthetic oligonucleotide
  misc_feature 1..20: note = Target: ANGPTL4; (+) strand; PAM type: NRG; PAM sequence: TGG
  source 1..20: mol_type = other DNA
gctagctgggctcctgagtc

SEQ ID NO: 12731 - DNA, 20 bp, synthetic construct
  misc_feature 1..20: note = Description of Artificial Sequence: Synthetic oligonucleotide
  misc_feature 1..20: note = Target: ANGPTL4; (+) strand; PAM type: NRG; PAM sequence: TGG
  source 1..20: mol_type = other DNA
agctgggctcctgagtctgg

SEQ ID NO: 12732 - DNA, 20 bp, synthetic construct
  misc_feature 1..20: note = Description of Artificial Sequence: Synthetic oligonucleotide
  misc_feature 1..20: note = Target: ANGPTL4; (+) strand; PAM type: NRG; PAM sequence: GGG
  source 1..20: mol_type = other DNA
gctgggctcctgagtctggt

SEQ ID NO: 12733 - DNA, 20 bp, synthetic construct
  misc_feature 1..20: note = Description of Artificial Sequence: Synthetic oligonucleotide
  misc_feature 1..20: note = Target: ANGPTL4; (+) strand; PAM type: NRG; PAM sequence: GGG
  source 1..20: mol_type = other DNA
ctgggctcctgagtctggtg

SEQ ID NO: 12734 - DNA, 20 bp, synthetic construct
  misc_feature 1..20: note = Description of Artificial Sequence: Synthetic oligonucleotide
  misc_feature 1..20: note = Target: ANGPTL4; (+) strand; PAM type: NRG; PAM sequence: TGG
  source 1..20: mol_type = other DNA
tcctgagtctggtggggacg

SEQ ID NO: 12735 - DNA, 20 bp, synthetic construct
  misc_feature 1..20: note = Description of Artificial Sequence: Synthetic oligonucleotide
  misc_feature 1..20: note = Target: ANGPTL4; (+) strand; PAM type: NRG; PAM sequence: GAG
  source 1..20: mol_type = other DNA
ctgagtctggtggggacgtg

SEQ ID NO: 12736 - DNA, 20 bp, synthetic construct
  misc_feature 1..20: note = Description of Artificial Sequence: Synthetic oligonucleotide
  misc_feature 1..20: note = Target: ANGPTL4; (+) strand; PAM type: NRG; PAM sequence: TAG
  source 1..20: mol_type = other DNA
ggacgtggagaacctttgtc

SEQ ID NO: 12737 - DNA, 20 bp, synthetic construct
  misc_feature 1..20: note = Description of Artificial Sequence: Synthetic oligonucleotide
  misc_feature 1..20: note = Target: ANGPTL4; (+) strand; PAM type: NRG; PAM sequence: CAG
  source 1..20: mol_type = other DNA
tggagaacctttgtctagct

SEQ ID NO: 12738 - DNA, 20 bp, synthetic construct
  misc_feature 1..20: note = Description of Artificial Sequence: Synthetic oligonucleotide
  misc_feature 1..20: note = Target: ANGPTL4; (+) strand; PAM type: NRG; PAM sequence: AGG
  source 1..20: mol_type = other DNA
ggagaacctttgtctagctc

SEQ ID NO: 12739 - DNA, 20 bp, synthetic construct
  misc_feature 1..20: note = Description of Artificial Sequence: Synthetic oligonucleotide
  misc_feature 1..20: note = Target: ANGPTL4; (+) strand; PAM type: NRG; PAM sequence: GGG
  source 1..20: mol_type = other DNA
gagaacctttgtctagctca

SEQ ID NO: 12740 - DNA, 20 bp, synthetic construct
  misc_feature 1..20: note = Description of Artificial Sequence: Synthetic oligonucleotide
  misc_feature 1..20: note = Target: ANGPTL4; (+) strand; PAM type: NRG; PAM sequence: TAG
  source 1..20: mol_type = other DNA
accaatcatcaccctatgtc

SEQ ID NO: 12741 - DNA, 20 bp, synthetic construct
  misc_feature 1..20: note = Description of Artificial Sequence: Synthetic oligonucleotide
  misc_feature 1..20: note = Target: ANGPTL4; (+) strand; PAM type: NRG; PAM sequence: CAG
  source 1..20: mol_type = other DNA
tcatcaccctatgtctagct

SEQ ID NO: 12742 - DNA, 20 bp, synthetic construct
  misc_feature 1..20: note = Description of Artificial Sequence: Synthetic oligonucleotide
  misc_feature 1..20: note = Target: ANGPTL4; (+) strand; PAM type: NRG; PAM sequence: AGG
  source 1..20: mol_type = other DNA
catcaccctatgtctagctc

SEQ ID NO: 12743 - DNA, 20 bp, synthetic construct
  misc_feature 1..20: note = Description of Artificial Sequence: Synthetic oligonucleotide
  misc_feature 1..20: note = Target: ANGPTL4; (+) strand; PAM type: NRG; PAM sequence: GGG
  source 1..20: mol_type = other DNA
atcaccctatgtctagctca

SEQ ID NO: 12744 - DNA, 20 bp, synthetic construct
  misc_feature 1..20: note = Description of Artificial Sequence: Synthetic oligonucleotide
  misc_feature 1..20: note = Target: ANGPTL4; (+) strand; PAM type: NRG; PAM sequence: TAG
  source 1..20: mol_type = other DNA
accaatgaacactctgtatc

SEQ ID NO: 12745 - DNA, 20 bp, synthetic construct
  misc_feature 1..20: note = Description of Artificial Sequence: Synthetic oligonucleotide
  misc_feature 1..20: note = Target: ANGPTL4; (+) strand; PAM type: NRG; PAM sequence: TGG
  source 1..20: mol_type = other DNA
cactctgtatctagctactc

SEQ ID NO: 12746 - DNA, 20 bp, synthetic construct
  misc_feature 1..20: note = Description of Artificial Sequence: Synthetic oligonucleotide
  misc_feature 1..20: note = Target: ANGPTL4; (+) strand; PAM type: NRG; PAM sequence: TGG
  source 1..20: mol_type = other DNA
tctgtatctagctactctgg

SEQ ID NO: 12747 - DNA, 20 bp, synthetic construct
  misc_feature 1..20: note = Description of Artificial Sequence: Synthetic oligonucleotide
  misc_feature 1..20: note = Target: ANGPTL4; (+) strand; PAM type: NRG; PAM sequence: GGG
  source 1..20: mol_type = other DNA
ctgtatctagctactctggt

SEQ ID NO: 12748 - DNA, 20 bp, synthetic construct
  misc_feature 1..20: note = Description of Artificial Sequence: Synthetic oligonucleotide
  misc_feature 1..20: note = Target: ANGPTL4; (+) strand; PAM type: NRG; PAM sequence: GGG
  source 1..20: mol_type = other DNA
tgtatctagctactctggtg

SEQ ID NO: 12749 - DNA, 20 bp, synthetic construct
  misc_feature 1..20: note = Description of Artificial Sequence: Synthetic oligonucleotide
  misc_feature 1..20: note = Target: ANGPTL4; (+) strand; PAM type: NRG; PAM sequence: TGG
  source 1..20: mol_type = other DNA
tagctactctggtggggcct

SEQ ID NO: 12750 - DNA, 20 bp, synthetic construct
  misc_feature 1..20: note = Description of Artificial Sequence: Synthetic oligonucleotide
  misc_feature 1..20: note = Target: ANGPTL4; (+) strand; PAM type: NRG; PAM sequence: GAG
  source 1..20: mol_type = other DNA
gctactctggtggggccttg

SEQ ID NO: 12751 - DNA, 20 bp, synthetic construct
  misc_feature 1..20: note = Description of Artificial Sequence: Synthetic oligonucleotide
  misc_feature 1..20: note = Target: ANGPTL4; (+) strand; PAM type: NRG; PAM sequence: TAG
  source 1..20: mol_type = other DNA
ccttggagaacctttatgtc

SEQ ID NO: 12752 - DNA, 20 bp, synthetic construct
  misc_feature 1..20: note = Description of Artificial Sequence: Synthetic oligonucleotide
  misc_feature 1..20: note = Target: ANGPTL4; (+) strand; PAM type: NRG; PAM sequence: CAG
  source 1..20: mol_type = other DNA
gagaacctttatgtctagct

SEQ ID NO: 12753 - DNA, 20 bp, synthetic construct
  misc_feature 1..20: note = Description of Artificial Sequence: Synthetic oligonucleotide
  misc_feature 1..20: note = Target: ANGPTL4; (+) strand; PAM type: NRG; PAM sequence: AGG
  source 1..20: mol_type = other DNA
agaacctttatgtctagctc

SEQ ID NO: 12754 - DNA, 20 bp, synthetic construct
  misc_feature 1..20: note = Description of Artificial Sequence: Synthetic oligonucleotide
  misc_feature 1..20: note = Target: ANGPTL4; (+) strand; PAM type: NRG; PAM sequence: GGG
  source 1..20: mol_type = other DNA
gaacctttatgtctagctca

SEQ ID NO: 12755 - DNA, 20 bp, synthetic construct
  misc_feature 1..20: note = Description of Artificial Sequence: Synthetic oligonucleotide
  misc_feature 1..20: note = Target: ANGPTL4; (+) strand; PAM type: NRG; PAM sequence: CGG
  source 1..20: mol_type = other DNA
gggattgtaaatacaccaat

SEQ ID NO: 12756 - DNA, 20 bp, synthetic construct
  misc_feature 1..20: note = Description of Artificial Sequence: Synthetic oligonucleotide
  misc_feature 1..20: note = Target: ANGPTL4; (+) strand; PAM type: NRG; PAM sequence: TAG
  source 1..20: mol_type = other DNA
accaatcggcactctgtatc

SEQ ID NO: 12757 - DNA, 20 bp, synthetic construct
  misc_feature 1..20: note = Description of Artificial Sequence: Synthetic oligonucleotide
  misc_feature 1..20: note = Target: ANGPTL4; (+) strand; PAM type: NRG; PAM sequence: AAG
  source 1..20: mol_type = other DNA
cggcactctgtatctagctc

SEQ ID NO: 12758 - DNA, 20 bp, synthetic construct
  misc_feature 1..20: note = Description of Artificial Sequence: Synthetic oligonucleotide
  misc_feature 1..20: note = Target: ANGPTL4; (+) strand; PAM type: NRG; PAM sequence: AGG
  source 1..20: mol_type = other DNA
ggcactctgtatctagctca

SEQ ID NO: 12759 - DNA, 20 bp, synthetic construct
  misc_feature 1..20: note = Description of Artificial Sequence: Synthetic oligonucleotide
  misc_feature 1..20: note = Target: ANGPTL4; (+) strand; PAM type: NRG; PAM sequence: CAG
  source 1..20: mol_type = other DNA
aggtttgtaaacacaccaat

SEQ ID NO: 12760 - DNA, 20 bp, synthetic construct
  misc_feature 1..20: note = Description of Artificial Sequence: Synthetic oligonucleotide
  misc_feature 1..20: note = Target: ANGPTL4; (+) strand; PAM type: NRG; PAM sequence: TAG
  source 1..20: mol_type = other DNA
accaatcagcaccctgtgtc

SEQ ID NO: 12761 - DNA, 20 bp, synthetic construct
  misc_feature 1..20: note = Description of Artificial Sequence: Synthetic oligonucleotide
  misc_feature 1..20: note = Target: ANGPTL4; (+) strand; PAM type: NRG; PAM sequence: CAG
  source 1..20: mol_type = other DNA
tcagcaccctgtgtctagct

SEQ ID NO: 12762 - DNA, 20 bp, synthetic construct
  misc_feature 1..20: note = Description of Artificial Sequence: Synthetic oligonucleotide
  misc_feature 1..20: note = Target: ANGPTL4; (+) strand; PAM type: NRG; PAM sequence: AGG
  source 1..20: mol_type = other DNA
cagcaccctgtgtctagctc

SEQ ID NO: 12763 - DNA, 20 bp, synthetic construct
  misc_feature 1..20: note = Description of Artificial Sequence: Synthetic oligonucleotide
  misc_feature 1..20: note = Target: ANGPTL4; (+) strand; PAM type: NRG; PAM sequence: GGG
  source 1..20: mol_type = other DNA
agcaccctgtgtctagctca

SEQ ID NO: 12764 - DNA, 20 bp, synthetic construct
  misc_feature 1..20: note = Description of Artificial Sequence: Synthetic oligonucleotide
  misc_feature 1..20: note = Target: ANGPTL4; (+) strand; PAM type: NRG; PAM sequence: TAG
  source 1..20: mol_type = other DNA
accaatcgacactctgtatc

SEQ ID NO: 12765 - DNA, 20 bp, synthetic construct
  misc_feature 1..20: note = Description of Artificial Sequence: Synthetic oligonucleotide
  misc_feature 1..20: note = Target: ANGPTL4; (+) strand; PAM type: NRG; PAM sequence: TGG
  source 1..20: mol_type = other DNA
cactctgtatctagctactg

SEQ ID NO: 12766 - DNA, 20 bp, synthetic construct
  misc_feature 1..20: note = Description of Artificial Sequence: Synthetic oligonucleotide
  misc_feature 1..20: note = Target: ANGPTL4; (+) strand; PAM type: NRG; PAM sequence: TGG
  source 1..20: mol_type = other DNA
tctgtatctagctactgtgg

SEQ ID NO: 12767 - DNA, 20 bp, synthetic construct
  misc_feature 1..20: note = Description of Artificial Sequence: Synthetic oligonucleotide
  misc_feature 1..20: note = Target: ANGPTL4; (+) strand; PAM type: NRG; PAM sequence: GGG
  source 1..20: mol_type = other DNA
ctgtatctagctactgtggt

SEQ ID NO: 12768 - DNA, 20 bp, synthetic construct
  misc_feature 1..20: note = Description of Artificial Sequence: Synthetic oligonucleotide
  misc_feature 1..20: note = Target: ANGPTL4; (+) strand; PAM type: NRG; PAM sequence: GGG
  source 1..20: mol_type = other DNA
tgtatctagctactgtggtg

SEQ ID NO: 12769 - DNA, 20 bp, synthetic construct
  misc_feature 1..20: note = Description of Artificial Sequence: Synthetic oligonucleotide
  misc_feature 1..20: note = Target: ANGPTL4; (+) strand; PAM type: NRG; PAM sequence: TGG
  source 1..20: mol_type = other DNA
tagctactgtggtggggcct

SEQ ID NO: 12770 - DNA, 20 bp, synthetic construct
  misc_feature 1..20: note = Description of Artificial Sequence: Synthetic oligonucleotide
  misc_feature 1..20: note = Target: ANGPTL4; (+) strand; PAM type: NRG; PAM sequence: GAG
  source 1..20: mol_type = other DNA
gctactgtggtggggccttg

SEQ ID NO: 12771 - DNA, 20 bp, synthetic construct
  misc_feature 1..20: note = Description of Artificial Sequence: Synthetic oligonucleotide
  misc_feature 1..20: note = Target: ANGPTL4; (+) strand; PAM type: NRG; PAM sequence: TAG
  source 1..20: mol_type = other DNA
ttgtgttgacactctgtatc

SEQ ID NO: 12772 - DNA, 20 bp, synthetic construct
  misc_feature 1..20: note = Description of Artificial Sequence: Synthetic oligonucleotide
  misc_feature 1..20: note = Target: ANGPTL4; (+) strand; PAM type: NRG; PAM sequence: TGG
  source 1..20: mol_type = other DNA
cactctgtatctagttaatc

SEQ ID NO: 12773 - DNA, 20 bp, synthetic construct
  misc_feature 1..20: note = Description of Artificial Sequence: Synthetic oligonucleotide
  misc_feature 1..20: note = Target: ANGPTL4; (+) strand; PAM type: NRG; PAM sequence: TGG
  source 1..20: mol_type = other DNA
tctgtatctagttaatctgg

SEQ ID NO: 12774 - DNA, 20 bp, synthetic construct
  misc_feature 1..20: note = Description of Artificial Sequence: Synthetic oligonucleotide
  misc_feature 1..20: note = Target: ANGPTL4; (+) strand; PAM type: NRG; PAM sequence: GGG
  source 1..20: mol_type = other DNA
ctgtatctagttaatctggt

SEQ ID NO: 12775 - DNA, 20 bp, synthetic construct
  misc_feature 1..20: note = Description of Artificial Sequence: Synthetic oligonucleotide
  misc_feature 1..20: note = Target: ANGPTL4; (+) strand; PAM type: NRG; PAM sequence: GGG
  source 1..20: mol_type = other DNA
tgtatctagttaatctggtg

SEQ ID NO: 12776 - DNA, 20 bp, synthetic construct
  misc_feature 1..20: note = Description of Artificial Sequence: Synthetic oligonucleotide
  misc_feature 1..20: note = Target: ANGPTL4; (+) strand; PAM type: NRG; PAM sequence: TGG
  source 1..20: mol_type = other DNA
tagttaatctggtggggatg

SEQ ID NO: 12777 - DNA, 20 bp, synthetic construct
  misc_feature 1..20: note = Description of Artificial Sequence: Synthetic oligonucleotide
  misc_feature 1..20: note = Target: ANGPTL4; (+) strand; PAM type: NRG; PAM sequence: GAG
  source 1..20: mol_type = other DNA
gttaatctggtggggatgtg

SEQ ID NO: 12778 - DNA, 20 bp, synthetic construct
  misc_feature 1..20: note = Description of Artificial Sequence: Synthetic oligonucleotide
  misc_feature 1..20: note = Target: ANGPTL4; (+) strand; PAM type: NRG; PAM sequence: TAG
  source 1..20: mol_type = other DNA
atgtggagaacctttgtgtc

SEQ ID NO: 12779 - DNA, 20 bp, synthetic construct
  misc_feature 1..20: note = Description of Artificial Sequence: Synthetic oligonucleotide
  misc_feature 1..20: note = Target: ANGPTL4; (+) strand; PAM type: NRG; PAM sequence: CAG
  source 1..20: mol_type = other DNA
gagaacctttgtgtctagct

SEQ ID NO: 12780 - DNA, 20 bp, synthetic construct
  misc_feature 1..20: note = Description of Artificial Sequence: Synthetic oligonucleotide
  misc_feature 1..20: note = Target: ANGPTL4; (+) strand; PAM type: NRG; PAM sequence: AGG
  source 1..20: mol_type = other DNA
agaacctttgtgtctagctc

SEQ ID NO: 12781 - DNA, 20 bp, synthetic construct
  misc_feature 1..20: note = Description of Artificial Sequence: Synthetic oligonucleotide
  misc_feature 1..20: note = Target: ANGPTL4; (+) strand; PAM type: NRG; PAM sequence: CAG
  source 1..20: mol_type = other DNA
ggaattgtaaacgcaccaat

SEQ ID NO: 12782 - DNA, 20 bp, synthetic construct
  misc_feature 1..20: note = Description of Artificial Sequence: Synthetic oligonucleotide
  misc_feature 1..20: note = Target: ANGPTL4; (+) strand; PAM type: NRG; PAM sequence: CAG
  source 1..20: mol_type = other DNA
caatcagcgccctgtcaaaa

SEQ ID NO: 12783 - DNA, 20 bp, synthetic construct
  misc_feature 1..20: note = Description of Artificial Sequence: Synthetic oligonucleotide
  misc_feature 1..20: note = Target: ANGPTL4; (+) strand; PAM type: NRG; PAM sequence: CAG
  source 1..20: mol_type = other DNA
agcgccctgtcaaaacagac

SEQ ID NO: 12784 - DNA, 20 bp, synthetic construct
  misc_feature 1..20: note = Description of Artificial Sequence: Synthetic oligonucleotide
  misc_feature 1..20: note = Target: ANGPTL4; (+) strand; PAM type: NRG; PAM sequence: TGG
  source 1..20: mol_type = other DNA
gccctgtcaaaacagaccag

SEQ ID NO: 12785 - DNA, 20 bp, synthetic construct
  misc_feature 1..20: note = Description of Artificial Sequence: Synthetic oligonucleotide
  misc_feature 1..20: note = Target: ANGPTL4; (+) strand; PAM type: NRG; PAM sequence: GGG
  source 1..20: mol_type = other DNA
ccctgtcaaaacagaccagt

SEQ ID NO: 12786 - DNA, 20 bp, synthetic construct
  misc_feature 1..20: note = Description of Artificial Sequence: Synthetic oligonucleotide
  misc_feature 1..20: note = Target: ANGPTL4; (+) strand; PAM type: NRG; PAM sequence: CAG
  source 1..20: mol_type = other DNA
gaccagtgggctctaccaat

SEQ ID NO: 12787 - DNA, 20 bp, synthetic construct
  misc_feature 1..20: note = Description of Artificial Sequence: Synthetic oligonucleotide
  misc_feature 1..20: note = Target: ANGPTL4; (+) strand; PAM type: NRG; PAM sequence: CAG
  source 1..20: mol_type = other DNA
cagtgggctctaccaatcag

SEQ ID NO: 12788 - DNA, 20 bp, synthetic construct
  misc_feature 1..20: note = Description of Artificial Sequence: Synthetic oligonucleotide
  misc_feature 1..20: note = Target: ANGPTL4; (+) strand; PAM type: NRG; PAM sequence: AGG
  source 1..20: mol_type = other DNA
agtgggctctaccaatcagc

SEQ ID NO: 12789 - DNA, 20 bp, synthetic construct
  misc_feature 1..20: note = Description of Artificial Sequence: Synthetic oligonucleotide
  misc_feature 1..20: note = Target: ANGPTL4; (+) strand; PAM type: NRG; PAM sequence: TGG
  source 1..20: mol_type = other DNA
ctctaccaatcagcaggatg

SEQ ID NO: 12790 - DNA, 20 bp, synthetic construct
  misc_feature 1..20: note = Description of Artificial Sequence: Synthetic oligonucleotide
  misc_feature 1..20: note = Target: ANGPTL4; (+) strand; PAM type: NRG; PAM sequence: GGG
  source 1..20: mol_type = other DNA
tctaccaatcagcaggatgt

SEQ ID NO: 12791 - DNA, 20 bp, synthetic construct
  misc_feature 1..20: note = Description of Artificial Sequence: Synthetic oligonucleotide
  misc_feature 1..20: note = Target: ANGPTL4; (+) strand; PAM type: NRG; PAM sequence: TGG
  source 1..20: mol_type = other DNA
accaatcagcaggatgtggg

SEQ ID NO: 12792 - DNA, 20 bp, synthetic construct
  misc_feature 1..20: note = Description of Artificial Sequence: Synthetic oligonucleotide
  misc_feature 1..20: note = Target: ANGPTL4; (+) strand; PAM type: NRG; PAM sequence: GGG
  source 1..20: mol_type = other DNA
ccaatcagcaggatgtgggt

SEQ ID NO: 12793 - DNA, 20 bp, synthetic construct
  misc_feature 1..20: note = Description of Artificial Sequence: Synthetic oligonucleotide
  misc_feature 1..20: note = Target: ANGPTL4; (+) strand; PAM type: NRG; PAM sequence: GGG
  source 1..20: mol_type = other DNA
caatcagcaggatgtgggtg

SEQ ID NO: 12794 - DNA, 20 bp, synthetic construct
  misc_feature 1..20: note = Description of Artificial Sequence: Synthetic oligonucleotide
  misc_feature 1..20: note = Target: ANGPTL4; (+) strand; PAM type: NRG; PAM sequence: CAG
  source 1..20: mol_type = other DNA
cagcaggatgtgggtggggc

SEQ ID NO: 12795 - DNA, 20 bp, synthetic construct
  misc_feature 1..20: note = Description of Artificial Sequence: Synthetic oligonucleotide
  misc_feature 1..20: note = Target: ANGPTL4; (+) strand; PAM type: NRG; PAM sequence: AAG
  source 1..20: mol_type = other DNA
ggatgtgggtggggccagat

SEQ ID NO: 12796 - DNA, 20 bp, synthetic construct
  misc_feature 1..20: note = Description of Artificial Sequence: Synthetic oligonucleotide
  misc_feature 1..20: note = Target: ANGPTL4; (+) strand; PAM type: NRG; PAM sequence: GAG
  source 1..20: mol_type = other DNA
atgtgggtggggccagataa

SEQ ID NO: 12797 - DNA, 20 bp, synthetic construct
  misc_feature 1..20: note = Description of Artificial Sequence: Synthetic oligonucleotide
  misc_feature 1..20: note = Target: ANGPTL4; (+) strand; PAM type: NRG; PAM sequence: AAG
  source 1..20: mol_type = other DNA
ggggccagataagagaataa

SEQ ID NO: 12798 - DNA, 20 bp, synthetic construct
  misc_feature 1..20: note = Description of Artificial Sequence: Synthetic oligonucleotide
  misc_feature 1..20: note = Target: ANGPTL4; (+) strand; PAM type: NRG; PAM sequence: CAG
  source 1..20: mol_type = other DNA
gccagataagagaataaaag

SEQ ID NO: 12799 - DNA, 20 bp, synthetic construct
  misc_feature 1..20: note = Description of Artificial Sequence: Synthetic oligonucleotide
  misc_feature 1..20: note = Target: ANGPTL4; (+) strand; PAM type: NRG; PAM sequence: AGG
  source 1..20: mol_type = other DNA
ccagataagagaataaaagc

SEQ ID NO: 12800 - DNA, 20 bp, synthetic construct
  misc_feature 1..20: note = Description of Artificial Sequence: Synthetic oligonucleotide
  misc_feature 1..20: note = Target: ANGPTL4; (+) strand; PAM type: NRG; PAM sequence: GAG
  source 1..20: mol_type = other DNA
agaataaaagcaggctgccc

SEQ ID NO: 12801 - DNA, 20 bp, synthetic construct
  misc_feature 1..20: note = Description of Artificial Sequence: Synthetic oligonucleotide
  misc_feature 1..20: note = Target: ANGPTL4; (+) strand; PAM type: NRG; PAM sequence: CAG
  source 1..20: mol_type = other DNA
taaaagcaggctgcccgagc

SEQ ID NO: 12802 - DNA, 20 bp, synthetic construct
  misc_feature 1..20: note = Description of Artificial Sequence: Synthetic oligonucleotide
  misc_feature 1..20: note = Target: ANGPTL4; (+) strand; PAM type: NRG; PAM sequence: CAG
  source 1..20: mol_type = other DNA
aagcaggctgcccgagccag

SEQ ID NO: 12803 - DNA, 20 bp, synthetic construct
  misc_feature 1..20: note = Description of Artificial Sequence: Synthetic oligonucleotide
  misc_feature 1..20: note = Target: ANGPTL4; (+) strand; PAM type: NRG; PAM sequence: TGG
  source 1..20: mol_type = other DNA
caggctgcccgagccagcag

SEQ ID NO: 12804 - DNA, 20 bp, synthetic construct
  misc_feature 1..20: note = Description of Artificial Sequence: Synthetic oligonucleotide
  misc_feature 1..20: note = Target: ANGPTL4; (+) strand; PAM type: NRG; PAM sequence: TGG
  source 1..20: mol_type = other DNA
gccagcagtggcaacccact

SEQ ID NO: 12805 - DNA, 20 bp, synthetic construct
  misc_feature 1..20: note = Description of Artificial Sequence: Synthetic oligonucleotide
  misc_feature 1..20: note = Target: ANGPTL4; (+) strand; PAM type: NRG; PAM sequence: GGG
  source 1..20: mol_type = other DNA
ccagcagtggcaacccactt

SEQ ID NO: 12806 - DNA, 20 bp, synthetic construct
  misc_feature 1..20: note = Description of Artificial Sequence: Synthetic oligonucleotide
  misc_feature 1..20: note = Target: ANGPTL4; (+) strand; PAM type: NRG; PAM sequence: TGG
  source 1..20: mol_type = other DNA
ttgggtccccttccacactg

SEQ ID NO: 12807 - DNA, 20 bp, synthetic construct
  misc_feature 1..20: note = Description of Artificial Sequence: Synthetic oligonucleotide
  misc_feature 1..20: note = Target: ANGPTL4; (+) strand; PAM type: NRG; PAM sequence: AAG
  source 1..20: mol_type = other DNA
ggtccccttccacactgtgg

SEQ ID NO: 12808 - DNA, 20 bp, synthetic construct
  misc_feature 1..20: note = Description of Artificial Sequence: Synthetic oligonucleotide
  misc_feature 1..20: note = Target: ANGPTL4; (+) strand; PAM type: NRG; PAM sequence: TGG
  source 1..20: mol_type = other DNA
atcttgtactgctcactctt

SEQ ID NO: 12809 - DNA, 20 bp, synthetic construct
  misc_feature 1..20: note = Description of Artificial Sequence: Synthetic oligonucleotide
  misc_feature 1..20: note = Target: ANGPTL4; (+) strand; PAM type: NRG; PAM sequence: GGG
  source 1..20: mol_type = other DNA
tcttgtactgctcactcttt

SEQ ID NO: 12810 - DNA, 20 bp, synthetic construct
  misc_feature 1..20: note = Description of Artificial Sequence: Synthetic oligonucleotide
  misc_feature 1..20: note = Target: ANGPTL4; (+) strand; PAM type: NRG; PAM sequence: GAG
  source 1..20: mol_type = other DNA
tgggtccccactgcttttat

SEQ ID NO: 12811 - DNA, 20 bp, synthetic construct
  misc_feature 1..20: note = Description of Artificial Sequence: Synthetic oligonucleotide
  misc_feature 1..20: note = Target: ANGPTL4; (+) strand; PAM type: NRG; PAM sequence: AAG
  source 1..20: mol_type = other DNA
gagctgtaacactcactgcg

SEQ ID NO: 12812 - DNA, 20 bp, synthetic construct
  misc_feature 1..20: note = Description of Artificial Sequence: Synthetic oligonucleotide
  misc_feature 1..20: note = Target: ANGPTL4; (+) strand; PAM type: NRG; PAM sequence: AGG
  source 1..20: mol_type = other DNA
agctgtaacactcactgcga

SEQ ID NO: 12813 - DNA, 20 bp, synthetic construct
  misc_feature 1..20: note = Description of Artificial Sequence: Synthetic oligonucleotide
  misc_feature 1..20: note = Target: ANGPTL4; (+) strand; PAM type: NRG; PAM sequence: CAG
  source 1..20: mol_type = other DNA
acactcactgcgaaggtctg

SEQ ID NO: 12814 - DNA, 20 bp, synthetic construct
  misc_feature 1..20: note = Description of Artificial Sequence: Synthetic oligonucleotide
  misc_feature 1..20: note = Target: ANGPTL4; (+) strand; PAM type: NRG; PAM sequence: GAG
  source 1..20: mol_type = other DNA
aggtctgcagcttcactcct

SEQ ID NO: 12815 - DNA, 20 bp, synthetic construct
  misc_feature 1..20: note = Description of Artificial Sequence: Synthetic oligonucleotide
  misc_feature 1..20: note = Target: ANGPTL4; (+) strand; PAM type: NRG; PAM sequence: CAG
  source 1..20: mol_type = other DNA
ctgcagcttcactcctgagc

SEQ ID NO: 12816 - DNA, 20 bp, synthetic construct
  misc_feature 1..20: note = Description of Artificial Sequence: Synthetic oligonucleotide
  misc_feature 1..20: note = Target: ANGPTL4; (+) strand; PAM type: NRG; PAM sequence: CAG
  source 1..20: mol_type = other DNA
cagtgaaaccatgaacccac

SEQ ID NO: 12817 - DNA, 20 bp, synthetic construct
  misc_feature 1..20: note = Description of Artificial Sequence: Synthetic oligonucleotide
  misc_feature 1..20: note = Target: ANGPTL4; (+) strand; PAM type: NRG; PAM sequence: AAG
  source 1..20: mol_type = other DNA
tgaaaccatgaacccaccag

SEQ ID NO: 12818 - DNA, 20 bp, synthetic construct
  misc_feature 1..20: note = Description of Artificial Sequence: Synthetic oligonucleotide
  misc_feature 1..20: note = Target: ANGPTL4; (+) strand; PAM type: NRG; PAM sequence: AGG
  source 1..20: mol_type = other DNA
gaaaccatgaacccaccaga

SEQ ID NO: 12819 - DNA, 20 bp, synthetic construct
  misc_feature 1..20: note = Description of Artificial Sequence: Synthetic oligonucleotide
  misc_feature 1..20: note = Target: ANGPTL4; (+) strand; PAM type: NRG; PAM sequence: AAG
  source 1..20: mol_type = other DNA
accatgaacccaccagaagg

SEQ ID NO: 12820 - DNA, 20 bp, synthetic construct
  misc_feature 1..20: note = Description of Artificial Sequence: Synthetic oligonucleotide
  misc_feature 1..20: note = Target: ANGPTL4; (+) strand; PAM type: NRG; PAM sequence: CAG
  source 1..20: mol_type = other DNA
cgctgaacacacctgaacat

SEQ ID NO: 12821 - DNA, 20 bp, synthetic construct
  misc_feature 1..20: note = Description of Artificial Sequence: Synthetic oligonucleotide
  misc_feature 1..20: note = Target: ANGPTL4; (+) strand; PAM type: NRG; PAM sequence: AAG
  source 1..20: mol_type = other DNA
tgaacacacctgaacatcag

SEQ ID NO: 12822 - DNA, 20 bp, synthetic construct
  misc_feature 1..20: note = Description of Artificial Sequence: Synthetic oligonucleotide
  misc_feature 1..20: note = Target: ANGPTL4; (+) strand; PAM type: NRG; PAM sequence: CAG
  source 1..20: mol_type = other DNA
acatcagaagaaacaaactc

SEQ ID NO: 12823 - DNA, 20 bp, synthetic construct
  misc_feature 1..20: note = Description of Artificial Sequence: Synthetic oligonucleotide
  misc_feature 1..20: note = Target: ANGPTL4; (+) strand; PAM type: NRG; PAM sequence: AAG
  source 1..20: mol_type = other DNA
aactccagacgcgccacctt

SEQ ID NO: 12824 - DNA, 20 bp, synthetic construct
  misc_feature 1..20: note = Description of Artificial Sequence: Synthetic oligonucleotide
  misc_feature 1..20: note = Target: ANGPTL4; (+) strand; PAM type: NRG; PAM sequence: GAG
  source 1..20: mol_type = other DNA
ctccagacgcgccaccttaa

SEQ ID NO: 12825 - DNA, 20 bp, synthetic construct
  misc_feature 1..20: note = Description of Artificial Sequence: Synthetic oligonucleotide
  misc_feature 1..20: note = Target: ANGPTL4; (+) strand; PAM type: NRG; PAM sequence: TGG
  source 1..20: mol_type = other DNA
agacgcgccaccttaagagc

SEQ ID NO: 12826 - DNA, 20 bp, synthetic construct
  misc_feature 1..20: note = Description of Artificial Sequence: Synthetic oligonucleotide
  misc_feature 1..20: note = Target: ANGPTL4; (+) strand; PAM type: NRG; PAM sequence: AAG
  source 1..20: mol_type = other DNA
agagctggaacacttaccgc

SEQ ID NO: 12827 - DNA, 20 bp, synthetic construct
  misc_feature 1..20: note = Description of Artificial Sequence: Synthetic oligonucleotide
  misc_feature 1..20: note = Target: ANGPTL4; (+) strand; PAM type: NRG; PAM sequence: AGG
  source 1..20: mol_type = other DNA
gagctggaacacttaccgca

SEQ ID NO: 12828 - DNA, 20 bp, synthetic construct
  misc_feature 1..20: note = Description of Artificial Sequence: Synthetic oligonucleotide
  misc_feature 1..20: note = Target: ANGPTL4; (+) strand; PAM type: NRG; PAM sequence: GGG
  source 1..20: mol_type = other DNA
agctggaacacttaccgcaa

SEQ ID NO: 12829 - DNA, 20 bp, synthetic construct
  misc_feature 1..20: note = Description of Artificial Sequence: Synthetic oligonucleotide
  misc_feature 1..20: note = Target: ANGPTL4; (+) strand; PAM type: NRG; PAM sequence: TGG
  source 1..20: mol_type = other DNA
acacttaccgcaagggtcca

SEQ ID NO: 12830 - DNA, 20 bp, synthetic construct
  misc_feature 1..20: note = Description of Artificial Sequence: Synthetic oligonucleotide
  misc_feature 1..20: note = Target: ANGPTL4; (+) strand; PAM type: NRG; PAM sequence: AAG
  source 1..20: mol_type = other DNA
ggtccatggcttcattcttg

SEQ ID NO: 12831 - DNA, 20 bp, synthetic construct
  misc_feature 1..20: note = Description of Artificial Sequence: Synthetic oligonucleotide
  misc_feature 1..20: note = Target: ANGPTL4; (+) strand; PAM type: NRG; PAM sequence: CAG
  source 1..20: mol_type = other DNA
catggcttcattcttgaagt

SEQ ID NO: 12832 - DNA, 20 bp, synthetic construct
  misc_feature 1..20: note = Description of Artificial Sequence: Synthetic oligonucleotide
  misc_feature 1..20: note = Target: ANGPTL4; (+) strand; PAM type: NRG; PAM sequence: GAG
  source 1..20: mol_type = other DNA
gcttcattcttgaagtcagt

SEQ ID NO: 12833 - DNA, 20 bp, synthetic construct
  misc_feature 1..20: note = Description of Artificial Sequence: Synthetic oligonucleotide
  misc_feature 1..20: note = Target: ANGPTL4; (+) strand; PAM type: NRG; PAM sequence: AAG
  source 1..20: mol_type = other DNA
ttcttgaagtcagtgagacc

SEQ ID NO: 12834 - DNA, 20 bp, synthetic construct
  misc_feature 1..20: note = Description of Artificial Sequence: Synthetic oligonucleotide
  misc_feature 1..20: note = Target: ANGPTL4; (+) strand; PAM type: NRG; PAM sequence: CGG
  source 1..20: mol_type = other DNA
gaccaagaaccccccaattc

SEQ ID NO: 12835 - DNA, 20 bp, synthetic construct
  misc_feature 1..20: note = Description of Artificial Sequence: Synthetic oligonucleotide
  misc_feature 1..20: note = Target: ANGPTL4; (+) strand; PAM type: NRG; PAM sequence: CAG
  source 1..20: mol_type = other DNA
gaaccccccaattccggata

SEQ ID NO: 12836 - DNA, 20 bp, synthetic construct
  misc_feature 1..20: note = Description of Artificial Sequence: Synthetic oligonucleotide
  misc_feature 1..20: note = Target: ANGPTL4; (+) strand; PAM type: NRG; PAM sequence: CAG
  source 1..20: mol_type = other DNA
gatacagtgccactgcactc

SEQ ID NO: 12837 - DNA, 20 bp, synthetic construct
  misc_feature 1..20: note = Description of Artificial Sequence: Synthetic oligonucleotide
  misc_feature 1..20: note = Target: ANGPTL4; (+) strand; PAM type: NRG; PAM sequence: CAG
  source 1..20: mol_type = other DNA
agtgccactgcactccagcc

SEQ ID NO: 12838 - DNA, 20 bp, synthetic construct
  misc_feature 1..20: note = Description of Artificial Sequence: Synthetic oligonucleotide
  misc_feature 1..20: note = Target: ANGPTL4; (+) strand; PAM type: NRG; PAM sequence: AGG
  source 1..20: mol_type = other DNA
gtgccactgcactccagccc

SEQ ID NO: 12839 - DNA, 20 bp, synthetic construct
  misc_feature 1..20: note = Description of Artificial Sequence: Synthetic oligonucleotide
  misc_feature 1..20: note = Target: ANGPTL4; (+) strand; PAM type: NRG; PAM sequence: CAG
  source 1..20: mol_type = other DNA
ctgcactccagcccaggcaa

SEQ ID NO: 12840 - DNA, 20 bp, synthetic construct
  misc_feature 1..20: note = Description of Artificial Sequence: Synthetic oligonucleotide
  misc_feature 1..20: note = Target: ANGPTL4; (+) strand; PAM type: NRG; PAM sequence: GAG
  source 1..20: mol_type = other DNA
gcactccagcccaggcaaca

SEQ ID NO: 12841 - DNA, 20 bp, synthetic construct
  misc_feature 1..20: note = Description of Artificial Sequence: Synthetic oligonucleotide
  misc_feature 1..20: note = Target: ANGPTL4; (+) strand; PAM type: NRG; PAM sequence: GAG
  source 1..20: mol_type = other DNA
tccagcccaggcaacagagc

SEQ ID NO: 12842 - DNA, 20 bp, synthetic construct
  misc_feature 1..20: note = Description of Artificial Sequence: Synthetic oligonucleotide
  misc_feature 1..20: note = Target: ANGPTL4; (+) strand; PAM type: NRG; PAM sequence: TGG
  source 1..20: mol_type = other DNA
aaaataaaaattgtaataat

SEQ ID NO: 12843 - DNA, 20 bp, synthetic construct
  misc_feature 1..20: note = Description of Artificial Sequence: Synthetic oligonucleotide
  misc_feature 1..20: note = Target: ANGPTL4; (+) strand; PAM type: NRG; PAM sequence: TAG
  source 1..20: mol_type = other DNA
ataattggataccctacatc

SEQ ID NO: 12844 - DNA, 20 bp, synthetic construct
  misc_feature 1..20: note = Description of Artificial Sequence: Synthetic oligonucleotide
  misc_feature 1..20: note = Target: ANGPTL4; (+) strand; PAM type: NRG; PAM sequence: AGG
  source 1..20: mol_type = other DNA
taattggataccctacatct

SEQ ID NO: 12845 - DNA, 20 bp, synthetic construct
  misc_feature 1..20: note = Description of Artificial Sequence: Synthetic oligonucleotide
  misc_feature 1..20: note = Target: ANGPTL4; (+) strand; PAM type: NRG; PAM sequence: GAG
  source 1..20: mol_type = other DNA
tacatctaggacatgtattt

SEQ ID NO: 12846 - DNA, 20 bp, synthetic construct
  misc_feature 1..20: note = Description of Artificial Sequence: Synthetic oligonucleotide
  misc_feature 1..20: note = Target: ANGPTL4; (+) strand; PAM type: NRG; PAM sequence: AGG
  source 1..20: mol_type = other DNA
acatctaggacatgtatttg

SEQ ID NO: 12847 - DNA, 20 bp, synthetic construct
  misc_feature 1..20: note = Description of Artificial Sequence: Synthetic oligonucleotide
  misc_feature 1..20: note = Target: ANGPTL4; (+) strand; PAM type: NRG; PAM sequence: CAG
  source 1..20: mol_type = other DNA
tctgtccattttctgaaccc

SEQ ID NO: 12848 - DNA, 20 bp, synthetic construct
  misc_feature 1..20: note = Description of Artificial Sequence: Synthetic oligonucleotide
  misc_feature 1..20: note = Target: ANGPTL4; (+) strand; PAM type: NRG; PAM sequence: GAG
  source 1..20: mol_type = other DNA
ttttttttttttttttttcc

SEQ ID NO: 12849 - DNA, 20 bp, synthetic construct
  misc_feature 1..20: note = Description of Artificial Sequence: Synthetic oligonucleotide
  misc_feature 1..20: note = Target: ANGPTL4; (+) strand; PAM type: NRG; PAM sequence: AAG
  source 1..20: mol_type = other DNA
tttttttttttttccgagac

SEQ ID NO: 12850 - DNA, 20 bp, synthetic construct
  misc_feature 1..20: note = Description of Artificial Sequence: Synthetic oligonucleotide
  misc_feature 1..20: note = Target: ANGPTL4; (+) strand; PAM type: NRG; PAM sequence: GAG
  source 1..20: mol_type = other DNA
tttttttttttccgagacaa

SEQ ID NO: 12851 - DNA, 20 bp, synthetic construct
  misc_feature 1..20: note = Description of Artificial Sequence: Synthetic oligonucleotide
  misc_feature 1..20: note = Target: ANGPTL4; (+) strand; PAM type: NRG; PAM sequence: CAG
  source 1..20: mol_type = other DNA
aagagtctcactctgtcacc

SEQ ID NO: 12852 - DNA, 20 bp, synthetic construct
  misc_feature 1..20: note = Description of Artificial Sequence: Synthetic oligonucleotide
  misc_feature 1..20: note = Target: ANGPTL4; (+) strand; PAM type: NRG; PAM sequence: AGG
  source 1..20: mol_type = other DNA
agagtctcactctgtcaccc

SEQ ID NO: 12853 - DNA, 20 bp, synthetic construct
  misc_feature 1..20: note = Description of Artificial Sequence: Synthetic oligonucleotide
  misc_feature 1..20: note = Target: ANGPTL4; (+) strand; PAM type: NRG; PAM sequence: TGG
  source 1..20: mol_type = other DNA
tctcactctgtcacccaggc

SEQ ID NO: 12854 - DNA, 20 bp, synthetic construct
  misc_feature 1..20: note = Description of Artificial Sequence: Synthetic oligonucleotide
  misc_feature 1..20: note = Target: ANGPTL4; (+) strand; PAM type: NRG; PAM sequence: GAG
  source 1..20: mol_type = other DNA
tcactctgtcacccaggctg

SEQ ID NO: 12855 - DNA, 20 bp, synthetic construct
  misc_feature 1..20: note = Description of Artificial Sequence: Synthetic oligonucleotide
  misc_feature 1..20: note = Target: ANGPTL4; (+) strand; PAM type: NRG; PAM sequence: CGG
  source 1..20: mol_type = other DNA
ctgtcacccaggctggagcg

SEQ ID NO: 12856 - DNA, 20 bp, synthetic construct
  misc_feature 1..20: note = Description of Artificial Sequence: Synthetic oligonucleotide
  misc_feature 1..20: note = Target: ANGPTL4; (+) strand; PAM type: NRG; PAM sequence: TAG
  source 1..20: mol_type = other DNA
tcacccaggctggagcgcgg

SEQ ID NO: 12857 - DNA, 20 bp, synthetic construct
  misc_feature 1..20: note = Description of Artificial Sequence: Synthetic oligonucleotide
  misc_feature 1..20: note = Target: ANGPTL4; (+) strand; PAM type: NRG; PAM sequence: CAG
  source 1..20: mol_type = other DNA
ggagcgcggtagtgcgatct

SEQ ID NO: 12858 - DNA, 20 bp, synthetic construct
  misc_feature 1..20: note = Description of Artificial Sequence: Synthetic oligonucleotide
  misc_feature 1..20: note = Target: ANGPTL4; (+) strand; PAM type: NRG; PAM sequence: CGG
  source 1..20: mol_type = other DNA
ttactgcaacctccacctcc

SEQ ID NO: 12859 - DNA, 20 bp, synthetic construct
  misc_feature 1..20: note = Description of Artificial Sequence: Synthetic oligonucleotide
  misc_feature 1..20: note = Target: ANGPTL4; (+) strand; PAM type: NRG; PAM sequence: GGG
  source 1..20: mol_type = other DNA
tactgcaacctccacctccc

SEQ ID NO: 12860 - DNA, 20 bp, synthetic construct
  misc_feature 1..20: note = Description of Artificial Sequence: Synthetic oligonucleotide
  misc_feature 1..20: note = Target: ANGPTL4; (+) strand; PAM type: NRG; PAM sequence: AAG
  source 1..20: mol_type = other DNA
aacctccacctcccgggttc

SEQ ID NO: 12861 - DNA, 20 bp, synthetic construct
  misc_feature 1..20: note = Description of Artificial Sequence: Synthetic oligonucleotide
  misc_feature 1..20: note = Target: ANGPTL4; (+) strand; PAM type: NRG; PAM sequence: CGG
  source 1..20: mol_type = other DNA
ttcaagcgattctcctgcct

SEQ ID NO: 12862 - DNA, 20 bp, synthetic construct
  misc_feature 1..20: note = Description of Artificial Sequence: Synthetic oligonucleotide
  misc_feature 1..20: note = Target: ANGPTL4; (+) strand; PAM type: NRG; PAM sequence: GAG
  source 1..20: mol_type = other DNA
ttctcctgcctcggcctccc

SEQ ID NO: 12863 - DNA, 20 bp, synthetic construct
  misc_feature 1..20: note = Description of Artificial Sequence: Synthetic oligonucleotide
  misc_feature 1..20: note = Target: ANGPTL4; (+) strand; PAM type: NRG; PAM sequence: TAG
  source 1..20: mol_type = other DNA
tcctgcctcggcctcccgag

SEQ ID NO: 12864 - DNA, 20 bp, synthetic construct
  misc_feature 1..20: note = Description of Artificial Sequence: Synthetic oligonucleotide
  misc_feature 1..20: note = Target: ANGPTL4; (+) strand; PAM type: NRG; PAM sequence: GAG
  source 1..20: mol_type = other DNA
cctcggcctcccgagtagct

SEQ ID NO: 12865 - DNA, 20 bp, synthetic construct
  misc_feature 1..20: note = Description of Artificial Sequence: Synthetic oligonucleotide
  misc_feature 1..20: note = Target: ANGPTL4; (+) strand; PAM type: NRG; PAM sequence: CAG
  source 1..20: mol_type = other DNA
ctcccgagtagctgagatta

SEQ ID NO: 12866 - DNA, 20 bp, synthetic construct
  misc_feature 1..20: note = Description of Artificial Sequence: Synthetic oligonucleotide
  misc_feature 1..20: note = Target: ANGPTL4; (+) strand; PAM type: NRG; PAM sequence: AGG
  source 1..20: mol_type = other DNA
tcccgagtagctgagattac

SEQ ID NO: 12867 - DNA, 20 bp, synthetic construct
  misc_feature 1..20: note = Description of Artificial Sequence: Synthetic oligonucleotide
  misc_feature 1..20: note = Target: ANGPTL4; (+) strand; PAM type: NRG; PAM sequence: CAG
  source 1..20: mol_type = other DNA
caggcgcctcccactgcacc

SEQ ID NO: 12868 - DNA, 20 bp, synthetic construct
  misc_feature 1..20: note = Description of Artificial Sequence: Synthetic oligonucleotide
  misc_feature 1..20: note = Target: ANGPTL4; (+) strand; PAM type: NRG; PAM sequence: TAG
  source 1..20: mol_type = other DNA
ccagctaatttttgtatttt

SEQ ID NO: 12869 - DNA, 20 bp, synthetic construct
  misc_feature 1..20: note = Description of Artificial Sequence: Synthetic oligonucleotide
  misc_feature 1..20: note = Target: ANGPTL4; (+) strand; PAM type: NRG; PAM sequence: TAG
  source 1..20: mol_type = other DNA
taatttttgtatttttagta

SEQ ID NO: 12870 - DNA, 20 bp, synthetic construct
  misc_feature 1..20: note = Description of Artificial Sequence: Synthetic oligonucleotide
  misc_feature 1..20: note = Target: ANGPTL4; (+) strand; PAM type: NRG; PAM sequence: TGG
  source 1..20: mol_type = other DNA
ttttgtatttttagtataga

SEQ ID NO: 12871 - DNA, 20 bp, synthetic construct
  misc_feature 1..20: note = Description of Artificial Sequence: Synthetic oligonucleotide
  misc_feature 1..20: note = Target: ANGPTL4; (+) strand; PAM type: NRG; PAM sequence: GGG
  source 1..20: mol_type = other DNA
tttgtatttttagtatagat

SEQ ID NO: 12872 - DNA, 20 bp, synthetic construct
  misc_feature 1..20: note = Description of Artificial Sequence: Synthetic oligonucleotide
  misc_feature 1..20: note = Target: ANGPTL4; (+) strand; PAM type: NRG; PAM sequence: TGG
  source 1..20: mol_type = other DNA
atttttagtatagatgggtt

SEQ ID NO: 12873 - DNA, 20 bp, synthetic construct
  misc_feature 1..20: note = Description of Artificial Sequence: Synthetic oligonucleotide
  misc_feature 1..20: note = Target: ANGPTL4; (+) strand; PAM type: NRG; PAM sequence: CAG
  source 1..20: mol_type = other DNA
ttagtatagatgggtttggc

SEQ ID NO: 12874 - DNA, 20 bp, synthetic construct
  misc_feature 1..20: note = Description of Artificial Sequence: Synthetic oligonucleotide
  misc_feature 1..20: note = Target: ANGPTL4; (+) strand; PAM type: NRG; PAM sequence: AGG
  source 1..20: mol_type = other DNA
tagtatagatgggtttggcc

SEQ ID NO: 12875 - DNA, 20 bp, synthetic construct
  misc_feature 1..20: note = Description of Artificial Sequence: Synthetic oligonucleotide
  misc_feature 1..20: note = Target: ANGPTL4; (+) strand; PAM type: NRG; PAM sequence: TGG
  source 1..20: mol_type = other DNA
atagatgggtttggccaggc

SEQ ID NO: 12876 - DNA, 20 bp, synthetic construct
  misc_feature 1..20: note = Description of Artificial Sequence: Synthetic oligonucleotide
  misc_feature 1..20: note = Target: ANGPTL4; (+) strand; PAM type: NRG; PAM sequence: AAG
  source 1..20: mol_type = other DNA
ggtctcaaactcctgacctc

SEQ ID NO: 12877 - DNA, 20 bp, synthetic construct
  misc_feature 1..20: note = Description of Artificial Sequence: Synthetic oligonucleotide
  misc_feature 1..20: note = Target: ANGPTL4; (+) strand; PAM type: NRG; PAM sequence: CGG
  source 1..20: mol_type = other DNA
ctcaagtgatctgcccgcct

SEQ ID NO: 12878 - DNA, 20 bp, synthetic construct
  misc_feature 1..20: note = Description of Artificial Sequence: Synthetic oligonucleotide
  misc_feature 1..20: note = Target: ANGPTL4; (+) strand; PAM type: NRG; PAM sequence: TGG
  source 1..20: mol_type = other DNA
cccgcctcggcctccgaaac

SEQ ID NO: 12879 - DNA, 20 bp, synthetic construct
  misc_feature 1..20: note = Description of Artificial Sequence: Synthetic oligonucleotide
  misc_feature 1..20: note = Target: ANGPTL4; (+) strand; PAM type: NRG; PAM sequence: TGG
  source 1..20: mol_type = other DNA
gcctcggcctccgaaactgg

SEQ ID NO: 12880 - DNA, 20 bp, synthetic construct
  misc_feature 1..20: note = Description of Artificial Sequence: Synthetic oligonucleotide
  misc_feature 1..20: note = Target: ANGPTL4; (+) strand; PAM type: NRG; PAM sequence: GGG
  source 1..20: mol_type = other DNA
cctcggcctccgaaactggt

SEQ ID NO: 12881 - DNA, 20 bp, synthetic construct
  misc_feature 1..20: note = Description of Artificial Sequence: Synthetic oligonucleotide
  misc_feature 1..20: note = Target: ANGPTL4; (+) strand; PAM type: NRG; PAM sequence: CAG
  source 1..20: mol_type = other DNA
ctccgaaactggtgggatta

SEQ ID NO: 12882 - DNA, 20 bp, synthetic construct
  misc_feature 1..20: note = Description of Artificial Sequence: Synthetic oligonucleotide
  misc_feature 1..20: note = Target: ANGPTL4; (+) strand; PAM type: NRG; PAM sequence: AGG
  source 1..20: mol_type = other DNA
tccgaaactggtgggattac

SEQ ID NO: 12883 - DNA, 20 bp, synthetic construct
  misc_feature 1..20: note = Description of Artificial Sequence: Synthetic oligonucleotide
  misc_feature 1..20: note = Target: ANGPTL4; (+) strand; PAM type: NRG; PAM sequence: AAG
  source 1..20: mol_type = other DNA
actggtgggattacaggcgc

SEQ ID NO: 12884 - DNA, 20 bp, synthetic construct
  misc_feature 1..20: note = Description of Artificial Sequence: Synthetic oligonucleotide
  misc_feature 1..20: note = Target: ANGPTL4; (+) strand; PAM type: NRG; PAM sequence: CGG
  source 1..20: mol_type = other DNA
caggcgcaagccactgtgcc

SEQ ID NO: 12885 - DNA, 20 bp, synthetic construct
  misc_feature 1..20: note = Description of Artificial Sequence: Synthetic oligonucleotide
  misc_feature 1..20: note = Target: ANGPTL4; (+) strand; PAM type: NRG; PAM sequence: CAG
  source 1..20: mol_type = other DNA
ctgttaatttatttttgccc

SEQ ID NO: 12886 - DNA, 20 bp, synthetic construct
  misc_feature 1..20: note = Description of Artificial Sequence: Synthetic oligonucleotide
  misc_feature 1..20: note = Target: ANGPTL4; (+) strand; PAM type: NRG; PAM sequence: TAG
  source 1..20: mol_type = other DNA
ctccctccaaatattcctta

SEQ ID NO: 12887 - DNA, 20 bp, synthetic construct
  misc_feature 1..20: note = Description of Artificial Sequence: Synthetic oligonucleotide
  misc_feature 1..20: note = Target: ANGPTL4; (+) strand; PAM type: NRG; PAM sequence: TGG
  source 1..20: mol_type = other DNA
tattccttatagatgtctct

SEQ ID NO: 12888 - DNA, 20 bp, synthetic construct
  misc_feature 1..20: note = Description of Artificial Sequence: Synthetic oligonucleotide
  misc_feature 1..20: note = Target: ANGPTL4; (+) strand; PAM type: NRG; PAM sequence: GGG
  source 1..20: mol_type = other DNA
attccttatagatgtctctt

SEQ ID NO: 12889 - DNA, 20 bp, synthetic construct
  misc_feature 1..20: note = Description of Artificial Sequence: Synthetic oligonucleotide
  misc_feature 1..20: note = Target: ANGPTL4; (+) strand; PAM type: NRG; PAM sequence: GGG
  source 1..20: mol_type = other DNA
ttccttatagatgtctcttg

SEQ ID NO: 12890 - DNA, 20 bp, synthetic construct
  misc_feature 1..20: note = Description of Artificial Sequence: Synthetic oligonucleotide
  misc_feature 1..20: note = Target: ANGPTL4; (+) strand; PAM type: NRG; PAM sequence: GAG
  source 1..20: mol_type = other DNA
ccttatagatgtctcttggg

SEQ ID NO: 12891 - DNA, 20 bp, synthetic construct
  misc_feature 1..20: note = Description of Artificial Sequence: Synthetic oligonucleotide
  misc_feature 1..20: note = Target: ANGPTL4; (+) strand; PAM type: NRG; PAM sequence: AGG
  source 1..20: mol_type = other DNA
cttatagatgtctcttgggg

SEQ ID NO: 12892 - DNA, 20 bp, synthetic construct
  misc_feature 1..20: note = Description of Artificial Sequence: Synthetic oligonucleotide
  misc_feature 1..20: note = Target: ANGPTL4; (+) strand; PAM type: NRG; PAM sequence: TGG
  source 1..20: mol_type = other DNA
atagatgtctcttggggagg

SEQ ID NO: 12893 - DNA, 20 bp, synthetic construct
  misc_feature 1..20: note = Description of Artificial Sequence: Synthetic oligonucleotide
  misc_feature 1..20: note = Target: ANGPTL4; (+) strand; PAM type: NRG; PAM sequence: TGG
  source 1..20: mol_type = other DNA
gatgtctcttggggaggtgg

SEQ ID NO: 12894 - DNA, 20 bp, synthetic construct
  misc_feature 1..20: note = Description of Artificial Sequence: Synthetic oligonucleotide
  misc_feature 1..20: note = Target: ANGPTL4; (+) strand; PAM type: NRG; PAM sequence: GGG
  source 1..20: mol_type = other DNA
atgtctcttggggaggtggt

SEQ ID NO: 12895 - DNA, 20 bp, synthetic construct
  misc_feature 1..20: note = Description of Artificial Sequence: Synthetic oligonucleotide
  misc_feature 1..20: note = Target: ANGPTL4; (+) strand; PAM type: NRG; PAM sequence: GGG
  source 1..20: mol_type = other DNA
tgtctcttggggaggtggtg

SEQ ID NO: 12896 - DNA, 20 bp, synthetic construct
  misc_feature 1..20: note = Description of Artificial Sequence: Synthetic oligonucleotide
  misc_feature 1..20: note = Target: ANGPTL4; (+) strand; PAM type: NRG; PAM sequence: GGG
  source 1..20: mol_type = other DNA
gtctcttggggaggtggtgg

SEQ ID NO: 12897 - DNA, 20 bp, synthetic construct
  misc_feature 1..20: note = Description of Artificial Sequence: Synthetic oligonucleotide
  misc_feature 1..20: note = Target: ANGPTL4; (+) strand; PAM type: NRG; PAM sequence: TAG
  source 1..20: mol_type = other DNA
ggtggtgggggttcttgcgc

SEQ ID NO: 12898 - DNA, 20 bp, synthetic construct
  misc_feature 1..20: note = Description of Artificial Sequence: Synthetic oligonucleotide
  misc_feature 1..20: note = Target: ANGPTL4; (+) strand; PAM type: NRG; PAM sequence: AAG
  source 1..20: mol_type = other DNA
ggtgggggttcttgcgctag

SEQ ID NO: 12899 - DNA, 20 bp, synthetic construct
  misc_feature 1..20: note = Description of Artificial Sequence: Synthetic oligonucleotide
  misc_feature 1..20: note = Target: ANGPTL4; (+) strand; PAM type: NRG; PAM sequence: TGG
  source 1..20: mol_type = other DNA
ttccttgtcttgacccttcc

SEQ ID NO: 12900 - DNA, 20 bp, synthetic construct
  misc_feature 1..20: note = Description of Artificial Sequence: Synthetic oligonucleotide
  misc_feature 1..20: note = Target: ANGPTL4; (+) strand; PAM type: NRG; PAM sequence: CAG
  source 1..20: mol_type = other DNA
cttgtcttgacccttcctgg

SEQ ID NO: 12901 - DNA, 20 bp, synthetic construct
  misc_feature 1..20: note = Description of Artificial Sequence: Synthetic oligonucleotide
  misc_feature 1..20: note = Target: ANGPTL4; (+) strand; PAM type: NRG; PAM sequence: AGG
  source 1..20: mol_type = other DNA
ttgtcttgacccttcctggc

SEQ ID NO: 12902 - DNA, 20 bp, synthetic construct
  misc_feature 1..20: note = Description of Artificial Sequence: Synthetic oligonucleotide
  misc_feature 1..20: note = Target: ANGPTL4; (+) strand; PAM type: NRG; PAM sequence: TGG
  source 1..20: mol_type = other DNA
tgacccttcctggcaggtgc

SEQ ID NO: 12903 - DNA, 20 bp, synthetic construct
  misc_feature 1..20: note = Description of Artificial Sequence: Synthetic oligonucleotide
  misc_feature 1..20: note = Target: ANGPTL4; (+) strand; PAM type: NRG; PAM sequence: GGG
  source 1..20: mol_type = other DNA
gacccttcctggcaggtgct

SEQ ID NO: 12904 - DNA, 20 bp, synthetic construct
  misc_feature 1..20: note = Description of Artificial Sequence: Synthetic oligonucleotide
  misc_feature 1..20: note = Target: ANGPTL4; (+) strand; PAM type: NRG; PAM sequence: GGG
  source 1..20: mol_type = other DNA
acccttcctggcaggtgctg

SEQ ID NO: 12905 - DNA, 20 bp, synthetic construct
  misc_feature 1..20: note = Description of Artificial Sequence: Synthetic oligonucleotide
  misc_feature 1..20: note = Target: ANGPTL4; (+) strand; PAM type: NRG; PAM sequence: CAG
  source 1..20: mol_type = other DNA
cctggcaggtgctggggaca

SEQ ID NO: 12906 - DNA, 20 bp, synthetic construct
  misc_feature 1..20: note = Description of Artificial Sequence: Synthetic oligonucleotide
  misc_feature 1..20: note = Target: ANGPTL4; (+) strand; PAM type: NRG; PAM sequence: TGG
  source 1..20: mol_type = other DNA
tggggacacagctgtttccc

SEQ ID NO: 12907 - DNA, 20 bp, synthetic construct
  misc_feature 1..20: note = Description of Artificial Sequence: Synthetic oligonucleotide
  misc_feature 1..20: note = Target: ANGPTL4; (+) strand; PAM type: NRG; PAM sequence: GGG
  source 1..20: mol_type = other DNA
ggggacacagctgtttccct

SEQ ID NO: 12908 - DNA, 20 bp, synthetic construct
  misc_feature 1..20: note = Description of Artificial Sequence: Synthetic oligonucleotide
  misc_feature 1..20: note = Target: ANGPTL4; (+) strand; PAM type: NRG; PAM sequence: GGG
  source 1..20: mol_type = other DNA
gggacacagctgtttccctg

SEQ ID NO: 12909 - DNA, 20 bp, synthetic construct
  misc_feature 1..20: note = Description of Artificial Sequence: Synthetic oligonucleotide
  misc_feature 1..20: note = Target: ANGPTL4; (+) strand; PAM type: NRG; PAM sequence: TGG
  source 1..20: mol_type = other DNA
cagctgtttccctggggctg

SEQ ID NO: 12910 - DNA, 20 bp, synthetic construct
  misc_feature 1..20: note = Description of Artificial Sequence: Synthetic oligonucleotide
  misc_feature 1..20: note = Target: ANGPTL4; (+) strand; PAM type: NRG; PAM sequence: TGG
  source 1..20: mol_type = other DNA
tgtttccctggggctgtggc

SEQ ID NO: 12911 - DNA, 20 bp, synthetic construct
  misc_feature 1..20: note = Description of Artificial Sequence: Synthetic oligonucleotide
  misc_feature 1..20: note = Target: ANGPTL4; (+) strand; PAM type: NRG; PAM sequence: GGG
  source 1..20: mol_type = other DNA
gtttccctggggctgtggct

SEQ ID NO: 12912 - DNA, 20 bp, synthetic construct
  misc_feature 1..20: note = Description of Artificial Sequence: Synthetic oligonucleotide
  misc_feature 1..20: note = Target: ANGPTL4; (+) strand; PAM type: NRG; PAM sequence: TAG
  source 1..20: mol_type = other DNA
cctggggctgtggctgggta

SEQ ID NO: 12913 - DNA, 20 bp, synthetic construct
  misc_feature 1..20: note = Description of Artificial Sequence: Synthetic oligonucleotide
  misc_feature 1..20: note = Target: ANGPTL4; (+) strand; PAM type: NRG; PAM sequence: AGG
  source 1..20: mol_type = other DNA
ctggggctgtggctgggtat

SEQ ID NO: 12914 - DNA, 20 bp, synthetic construct
  misc_feature 1..20: note = Description of Artificial Sequence: Synthetic oligonucleotide
  misc_feature 1..20: note = Target: ANGPTL4; (+) strand; PAM type: NRG; PAM sequence: TAG
  source 1..20: mol_type = other DNA
ggtataggtgacaaactttt

SEQ ID NO: 12915 - DNA, 20 bp, synthetic construct
  misc_feature 1..20: note = Description of Artificial Sequence: Synthetic oligonucleotide
  misc_feature 1..20: note = Target: ANGPTL4; (+) strand; PAM type: NRG; PAM sequence: TAG
  source 1..20: mol_type = other DNA
tgacaaactttttagctttg

SEQ ID NO: 12916 - DNA, 20 bp, synthetic construct
  misc_feature 1..20: note = Description of Artificial Sequence: Synthetic oligonucleotide
  misc_feature 1..20: note = Target: ANGPTL4; (+) strand; PAM type: NRG; PAM sequence: GAG
  source 1..20: mol_type = other DNA
acaaactttttagctttgta

SEQ ID NO: 12917 - DNA, 20 bp, synthetic construct
  misc_feature 1..20: note = Description of Artificial Sequence: Synthetic oligonucleotide
  misc_feature 1..20: note = Target: ANGPTL4; (+) strand; PAM type: NRG; PAM sequence: AGG
  source 1..20: mol_type = other DNA
caaactttttagctttgtag

SEQ ID NO: 12918 - DNA, 20 bp, synthetic construct
  misc_feature 1..20: note = Description of Artificial Sequence: Synthetic oligonucleotide
  misc_feature 1..20: note = Target: ANGPTL4; (+) strand; PAM type: NRG; PAM sequence: TAG
  source 1..20: mol_type = other DNA
actttttagctttgtagagg

SEQ ID NO: 12919 - DNA, 20 bp, synthetic construct
  misc_feature 1..20: note = Description of Artificial Sequence: Synthetic oligonucleotide
  misc_feature 1..20: note = Target: ANGPTL4; (+) strand; PAM type: NRG; PAM sequence: AGG
  source 1..20: mol_type = other DNA
ctttttagctttgtagaggt

SEQ ID NO: 12920 - DNA, 20 bp, synthetic construct
  misc_feature 1..20: note = Description of Artificial Sequence: Synthetic oligonucleotide
  misc_feature 1..20: note = Target: ANGPTL4; (+) strand; PAM type: NRG; PAM sequence: CAG
  source 1..20: mol_type = other DNA
ctttgtagaggtaggtccta

SEQ ID NO: 12921 - DNA, 20 bp, synthetic construct
  misc_feature 1..20: note = Description of Artificial Sequence: Synthetic oligonucleotide
  misc_feature 1..20: note = Target: ANGPTL4; (+) strand; PAM type: NRG; PAM sequence: CAG
  source 1..20: mol_type = other DNA
gaggtaggtcctacagctgc

SEQ ID NO: 12922 - DNA, 20 bp, synthetic construct
  misc_feature 1..20: note = Description of Artificial Sequence: Synthetic oligonucleotide
  misc_feature 1..20: note = Target: ANGPTL4; (+) strand; PAM type: NRG; PAM sequence: AGG
  source 1..20: mol_type = other DNA
aggtaggtcctacagctgcc

SEQ ID NO: 12923 - DNA, 20 bp, synthetic construct
  misc_feature 1..20: note = Description of Artificial Sequence: Synthetic oligonucleotide
  misc_feature 1..20: note = Target: ANGPTL4; (+) strand; PAM type: NRG; PAM sequence: CAG
  source 1..20: mol_type = other DNA
aggtcctacagctgccaggc

SEQ ID NO: 12924 - DNA, 20 bp, synthetic construct
  misc_feature 1..20: note = Description of Artificial Sequence: Synthetic oligonucleotide
  misc_feature 1..20: note = Target: ANGPTL4; (+) strand; PAM type: NRG; PAM sequence: AGG
  source 1..20: mol_type = other DNA
ggtcctacagctgccaggcc

SEQ ID NO: 12925 - DNA, 20 bp, synthetic construct
  misc_feature 1..20: note = Description of Artificial Sequence: Synthetic oligonucleotide
  misc_feature 1..20: note = Target: ANGPTL4; (+) strand; PAM type: NRG; PAM sequence: GGG
  source 1..20: mol_type = other DNA
gtcctacagctgccaggcca

SEQ ID NO: 12926 - DNA, 20 bp, synthetic construct
  misc_feature 1..20: note = Description of Artificial Sequence: Synthetic oligonucleotide
  misc_feature 1..20: note = Target: ANGPTL4; (+) strand; PAM type: NRG; PAM sequence: GAG
  source 1..20: mol_type = other DNA
cctacagctgccaggccagg

SEQ ID NO: 12927 - DNA, 20 bp, synthetic construct
  misc_feature 1..20: note = Description of Artificial Sequence: Synthetic oligonucleotide
  misc_feature 1..20: note = Target: ANGPTL4; (+) strand; PAM type: NRG; PAM sequence: AGG
  source 1..20: mol_type = other DNA
ctacagctgccaggccaggg

SEQ ID NO: 12928 - DNA, 20 bp, synthetic construct
  misc_feature 1..20: note = Description of Artificial Sequence: Synthetic oligonucleotide
  misc_feature 1..20: note = Target: ANGPTL4; (+) strand; PAM type: NRG; PAM sequence: TAG
  source 1..20: mol_type = other DNA
agctgccaggccagggaggc

SEQ ID NO: 12929 - DNA, 20 bp, synthetic construct
  misc_feature 1..20: note = Description of Artificial Sequence: Synthetic oligonucleotide
  misc_feature 1..20: note = Target: ANGPTL4; (+) strand; PAM type: NRG; PAM sequence: GAG
  source 1..20: mol_type = other DNA
ctgccaggccagggaggcta

SEQ ID NO: 12930 - DNA, 20 bp, synthetic construct
  misc_feature 1..20: note = Description of Artificial Sequence: Synthetic oligonucleotide
  misc_feature 1..20: note = Target: ANGPTL4; (+) strand; PAM type: NRG; PAM sequence: AGG
  source 1..20: mol_type = other DNA
tgccaggccagggaggctag

SEQ ID NO: 12931 - DNA, 20 bp, synthetic construct
  misc_feature 1..20: note = Description of Artificial Sequence: Synthetic oligonucleotide
  misc_feature 1..20: note = Target: ANGPTL4; (+) strand; PAM type: NRG; PAM sequence: CAG
  source 1..20: mol_type = other DNA
aggctagaggctgccctctc

SEQ ID NO: 12932 - DNA, 20 bp, synthetic construct
  misc_feature 1..20: note = Description of Artificial Sequence: Synthetic oligonucleotide
  misc_feature 1..20: note = Target: ANGPTL4; (+) strand; PAM type: NRG; PAM sequence: AGG
  source 1..20: mol_type = other DNA
ggctagaggctgccctctcc

SEQ ID NO: 12933 - DNA, 20 bp, synthetic construct
  misc_feature 1..20: note = Description of Artificial Sequence: Synthetic oligonucleotide
  misc_feature 1..20: note = Target: ANGPTL4; (+) strand; PAM type: NRG; PAM sequence: GAG
  source 1..20: mol_type = other DNA
gtttgcctgtgtcctgtact

SEQ ID NO: 12934 - DNA, 20 bp, synthetic construct
  misc_feature 1..20: note = Description of Artificial Sequence: Synthetic oligonucleotide
  misc_feature 1..20: note = Target: ANGPTL4; (+) strand; PAM type: NRG; PAM sequence: CAG
  source 1..20: mol_type = other DNA
tgcctgtgtcctgtactgag

SEQ ID NO: 12935 - DNA, 20 bp, synthetic construct
  misc_feature 1..20: note = Description of Artificial Sequence: Synthetic oligonucleotide
  misc_feature 1..20: note = Target: ANGPTL4; (+) strand; PAM type: NRG; PAM sequence: AGG
  source 1..20: mol_type = other DNA
gcctgtgtcctgtactgagc

SEQ ID NO: 12936 - DNA, 20 bp, synthetic construct
  misc_feature 1..20: note = Description of Artificial Sequence: Synthetic oligonucleotide
  misc_feature 1..20: note = Target: ANGPTL4; (+) strand; PAM type: NRG; PAM sequence: TAG
  source 1..20: mol_type = other DNA
tgtcctgtactgagcaggct

SEQ ID NO: 12937 - DNA, 20 bp, synthetic construct
  misc_feature 1..20: note = Description of Artificial Sequence: Synthetic oligonucleotide
  misc_feature 1..20: note = Target: ANGPTL4; (+) strand; PAM type: NRG; PAM sequence: GAG
  source 1..20: mol_type = other DNA
tcctgtactgagcaggctta

SEQ ID NO: 12938 - DNA, 20 bp, synthetic construct
  misc_feature 1..20: note = Description of Artificial Sequence: Synthetic oligonucleotide
  misc_feature 1..20: note = Target: ANGPTL4; (+) strand; PAM type: NRG; PAM sequence: AGG
  source 1..20: mol_type = other DNA
cctgtactgagcaggcttag

SEQ ID NO: 12939 - DNA, 20 bp, synthetic construct
  misc_feature 1..20: note = Description of Artificial Sequence: Synthetic oligonucleotide
  misc_feature 1..20: note = Target: ANGPTL4; (+) strand; PAM type: NRG; PAM sequence: GAG
  source 1..20: mol_type = other DNA
aggcttagaggatctcctct

SEQ ID NO: 12940 - DNA, 20 bp, synthetic construct
  misc_feature 1..20: note = Description of Artificial Sequence: Synthetic oligonucleotide
  misc_feature 1..20: note = Target: ANGPTL4; (+) strand; PAM type: NRG; PAM sequence: TGG
  source 1..20: mol_type = other DNA
tcctctgagcccactgtcac

SEQ ID NO: 12941 - DNA, 20 bp, synthetic construct
  misc_feature 1..20: note = Description of Artificial Sequence: Synthetic oligonucleotide
  misc_feature 1..20: note = Target: ANGPTL4; (+) strand; PAM type: NRG; PAM sequence: GAG
  source 1..20: mol_type = other DNA
ctctgagcccactgtcactg

SEQ ID NO: 12942 - DNA, 20 bp, synthetic construct
  misc_feature 1..20: note = Description of Artificial Sequence: Synthetic oligonucleotide
  misc_feature 1..20: note = Target: ANGPTL4; (+) strand; PAM type: NRG; PAM sequence: TGG
  source 1..20: mol_type = other DNA
gagcccactgtcactggagc

SEQ ID NO: 12943 - DNA, 20 bp, synthetic construct
  misc_feature 1..20: note = Description of Artificial Sequence: Synthetic oligonucleotide
  misc_feature 1..20: note = Target: ANGPTL4; (+) strand; PAM type: NRG; PAM sequence: TGG
  source 1..20: mol_type = other DNA
cccactgtcactggagctgg

SEQ ID NO: 12944 - DNA, 20 bp, synthetic construct
  misc_feature 1..20: note = Description of Artificial Sequence: Synthetic oligonucleotide
  misc_feature 1..20: note = Target: ANGPTL4; (+) strand; PAM type: NRG; PAM sequence: GAG
  source 1..20: mol_type = other DNA
ctgtcactggagctggtggt

SEQ ID NO: 12945 - DNA, 20 bp, synthetic construct
  misc_feature 1..20: note = Description of Artificial Sequence: Synthetic oligonucleotide
  misc_feature 1..20: note = Target: ANGPTL4; (+) strand; PAM type: NRG; PAM sequence: CAG
  source 1..20: mol_type = other DNA
actggagctggtggtgagtc

SEQ ID NO: 12946 - DNA, 20 bp, synthetic construct
  misc_feature 1..20: note = Description of Artificial Sequence: Synthetic oligonucleotide
  misc_feature 1..20: note = Target: ANGPTL4; (+) strand; PAM type: NRG; PAM sequence: CAG
  source 1..20: mol_type = other DNA
ctggtggtgagtccagtctg

SEQ ID NO: 12947 - DNA, 20 bp, synthetic construct
  misc_feature 1..20: note = Description of Artificial Sequence: Synthetic oligonucleotide
  misc_feature 1..20: note = Target: ANGPTL4; (+) strand; PAM type: NRG; PAM sequence: AGG
  source 1..20: mol_type = other DNA
tggtggtgagtccagtctgc

SEQ ID NO: 12948 - DNA, 20 bp, synthetic construct
  misc_feature 1..20: note = Description of Artificial Sequence: Synthetic oligonucleotide
  misc_feature 1..20: note = Target: ANGPTL4; (+) strand; PAM type: NRG; PAM sequence: GAG
  source 1..20: mol_type = other DNA
gtggtgagtccagtctgcag

SEQ ID NO: 12949 - DNA, 20 bp, synthetic construct
  misc_feature 1..20: note = Description of Artificial Sequence: Synthetic oligonucleotide
  misc_feature 1..20: note = Target: ANGPTL4; (+) strand; PAM type: NRG; PAM sequence: GAG
  source 1..20: mol_type = other DNA
ggtgagtccagtctgcagga

SEQ ID NO: 12950 - DNA, 20 bp, synthetic construct
  misc_feature 1..20: note = Description of Artificial Sequence: Synthetic oligonucleotide
  misc_feature 1..20: note = Target: ANGPTL4; (+) strand; PAM type: NRG; PAM sequence: AGG
  source 1..20: mol_type = other DNA
gtgagtccagtctgcaggag

SEQ ID NO: 12951 - DNA, 20 bp, synthetic construct
  misc_feature 1..20: note = Description of Artificial Sequence: Synthetic oligonucleotide
  misc_feature 1..20: note = Target: ANGPTL4; (+) strand; PAM type: NRG; PAM sequence: GGG
  source 1..20: mol_type = other DNA
tgagtccagtctgcaggaga

SEQ ID NO: 12952 - DNA, 20 bp, synthetic construct
  misc_feature 1..20: note = Description of Artificial Sequence: Synthetic oligonucleotide
  misc_feature 1..20: note = Target: ANGPTL4; (+) strand; PAM type: NRG; PAM sequence: GGG
  source 1..20: mol_type = other DNA
gagtccagtctgcaggagag

SEQ ID NO: 12953 - DNA, 20 bp, synthetic construct
  misc_feature 1..20: note = Description of Artificial Sequence: Synthetic oligonucleotide
  misc_feature 1..20: note = Target: ANGPTL4; (+) strand; PAM type: NRG; PAM sequence: GGG
  source 1..20: mol_type = other DNA
agtccagtctgcaggagagg

SEQ ID NO: 12954 - DNA, 20 bp, synthetic construct
  misc_feature 1..20: note = Description of Artificial Sequence: Synthetic oligonucleotide
  misc_feature 1..20: note = Target: ANGPTL4; (+) strand; PAM type: NRG; PAM sequence: TAG
  source 1..20: mol_type = other DNA
tgcaggagagggggttcctc

SEQ ID NO: 12955 - DNA, 20 bp, synthetic construct
  misc_feature 1..20: note = Description of Artificial Sequence: Synthetic oligonucleotide
  misc_feature 1..20: note = Target: ANGPTL4; (+) strand; PAM type: NRG; PAM sequence: CAG
  source 1..20: mol_type = other DNA
agccacaccctcttcatttc

SEQ ID NO: 12956 - DNA, 20 bp, synthetic construct
  misc_feature 1..20: note = Description of Artificial Sequence: Synthetic oligonucleotide
  misc_feature 1..20: note = Target: ANGPTL4; (+) strand; PAM type: NRG; PAM sequence: AGG
  source 1..20: mol_type = other DNA
gccacaccctcttcatttcc

SEQ ID NO: 12957 - DNA, 20 bp, synthetic construct
  misc_feature 1..20: note = Description of Artificial Sequence: Synthetic oligonucleotide
  misc_feature 1..20: note = Target: ANGPTL4; (+) strand; PAM type: NRG; PAM sequence: TGG
  source 1..20: mol_type = other DNA
tttccaggctctgccaatga

SEQ ID NO: 12958 - DNA, 20 bp, synthetic construct
  misc_feature 1..20: note = Description of Artificial Sequence: Synthetic oligonucleotide
  misc_feature 1..20: note = Target: ANGPTL4; (+) strand; PAM type: NRG; PAM sequence: GGG
  source 1..20: mol_type = other DNA
ttccaggctctgccaatgat

SEQ ID NO: 12959 - DNA, 20 bp, synthetic construct
  misc_feature 1..20: note = Description of Artificial Sequence: Synthetic oligonucleotide
  misc_feature 1..20: note = Target: ANGPTL4; (+) strand; PAM type: NRG; PAM sequence: CAG
  source 1..20: mol_type = other DNA
caatgtcatcctttttcctg

SEQ ID NO: 12960 - DNA, 20 bp, synthetic construct
  misc_feature 1..20: note = Description of Artificial Sequence: Synthetic oligonucleotide
  misc_feature 1..20: note = Target: ANGPTL4; (+) strand; PAM type: NRG; PAM sequence: AAG
  source 1..20: mol_type = other DNA
ctgcagccaccttgacctca

SEQ ID NO: 12961 - DNA, 20 bp, synthetic construct
  misc_feature 1..20: note = Description of Artificial Sequence: Synthetic oligonucleotide
  misc_feature 1..20: note = Target: ANGPTL4; (+) strand; PAM type: NRG; PAM sequence: TGG
  source 1..20: mol_type = other DNA
catttcctgcccctccaacc

SEQ ID NO: 12962 - DNA, 20 bp, synthetic construct
  misc_feature 1..20: note = Description of Artificial Sequence: Synthetic oligonucleotide
  misc_feature 1..20: note = Target: ANGPTL4; (+) strand; PAM type: NRG; PAM sequence: GGG
  source 1..20: mol_type = other DNA
atttcctgcccctccaacct

SEQ ID NO: 12963 - DNA, 20 bp, synthetic construct
  misc_feature 1..20: note = Description of Artificial Sequence: Synthetic oligonucleotide
  misc_feature 1..20: note = Target: ANGPTL4; (+) strand; PAM type: NRG; PAM sequence: GGG
  source 1..20: mol_type = other DNA
tttcctgcccctccaacctg

SEQ ID NO: 12964 - DNA, 20 bp, synthetic construct
  misc_feature 1..20: note = Description of Artificial Sequence: Synthetic oligonucleotide
  misc_feature 1..20: note = Target: ANGPTL4; (+) strand; PAM type: NRG; PAM sequence: CAG
  source 1..20: mol_type = other DNA
ccctccaacctggggaacga

SEQ ID NO: 12965 - DNA, 20 bp, synthetic construct
  misc_feature 1..20: note = Description of Artificial Sequence: Synthetic oligonucleotide
  misc_feature 1..20: note = Target: ANGPTL4; (+) strand; PAM type: NRG; PAM sequence: TGG
  source 1..20: mol_type = other DNA
aaaaaaaaaaaaccaccacc

SEQ ID NO: 12966 - DNA, 20 bp, synthetic construct
  misc_feature 1..20: note = Description of Artificial Sequence: Synthetic oligonucleotide
  misc_feature 1..20: note = Target: ANGPTL4; (+) strand; PAM type: NRG; PAM sequence: GGG
  source 1..20: mol_type = other DNA
aaaaaaaaaaaccaccacct

SEQ ID NO: 12967 - DNA, 20 bp, synthetic construct
  misc_feature 1..20: note = Description of Artificial Sequence: Synthetic oligonucleotide
  misc_feature 1..20: note = Target: ANGPTL4; (+) strand; PAM type: NRG; PAM sequence: CGG
  source 1..20: mol_type = other DNA
aaaaaaccaccacctgggca

SEQ ID NO: 12968 - DNA, 20 bp, synthetic construct
  misc_feature 1..20: note = Description of Artificial Sequence: Synthetic oligonucleotide
  misc_feature 1..20: note = Target: ANGPTL4; (+) strand; PAM type: NRG; PAM sequence: TGG
  source 1..20: mol_type = other DNA
aaaccaccacctgggcacgg

SEQ ID NO: 12969 - DNA, 20 bp, synthetic construct
  misc_feature 1..20: note = Description of Artificial Sequence: Synthetic oligonucleotide
  misc_feature 1..20: note = Target: ANGPTL4; (+) strand; PAM type: NRG; PAM sequence: TGG
  source 1..20: mol_type = other DNA
ctcctacactccccgcactc

SEQ ID NO: 12970 - DNA, 20 bp, synthetic construct
  misc_feature 1..20: note = Description of Artificial Sequence: Synthetic oligonucleotide
  misc_feature 1..20: note = Target: ANGPTL4; (+) strand; PAM type: NRG; PAM sequence: GGG
  source 1..20: mol_type = other DNA
tcctacactccccgcactct

SEQ ID NO: 12971 - DNA, 20 bp, synthetic construct
  misc_feature 1..20: note = Description of Artificial Sequence: Synthetic oligonucleotide
  misc_feature 1..20: note = Target: ANGPTL4; (+) strand; PAM type: NRG; PAM sequence: GAG
  source 1..20: mol_type = other DNA
ctacactccccgcactctgg

SEQ ID NO: 12972 - DNA, 20 bp, synthetic construct
  misc_feature 1..20: note = Description of Artificial Sequence: Synthetic oligonucleotide
  misc_feature 1..20: note = Target: ANGPTL4; (+) strand; PAM type: NRG; PAM sequence: AGG
  source 1..20: mol_type = other DNA
tacactccccgcactctggg

SEQ ID NO: 12973 - DNA, 20 bp, synthetic construct
  misc_feature 1..20: note = Description of Artificial Sequence: Synthetic oligonucleotide
  misc_feature 1..20: note = Target: ANGPTL4; (+) strand; PAM type: NRG; PAM sequence: GAG
  source 1..20: mol_type = other DNA
tccccgcactctgggaggct

SEQ ID NO: 12974 - DNA, 20 bp, synthetic construct
  misc_feature 1..20: note = Description of Artificial Sequence: Synthetic oligonucleotide
  misc_feature 1..20: note = Target: ANGPTL4; (+) strand; PAM type: NRG; PAM sequence: AGG
  source 1..20: mol_type = other DNA
ccccgcactctgggaggctg

SEQ ID NO: 12975 - DNA, 20 bp, synthetic construct
  misc_feature 1..20: note = Description of Artificial Sequence: Synthetic oligonucleotide
  misc_feature 1..20: note = Target: ANGPTL4; (+) strand; PAM type: NRG; PAM sequence: TGG
  source 1..20: mol_type = other DNA
cgcactctgggaggctgagg

SEQ ID NO: 12976 - DNA, 20 bp, synthetic construct
  misc_feature 1..20: note = Description of Artificial Sequence: Synthetic oligonucleotide
  misc_feature 1..20: note = Target: ANGPTL4; (+) strand; PAM type: NRG; PAM sequence: GGG
  source 1..20: mol_type = other DNA
gcactctgggaggctgaggt

SEQ ID NO: 12977 - DNA, 20 bp, synthetic construct
  misc_feature 1..20: note = Description of Artificial Sequence: Synthetic oligonucleotide
  misc_feature 1..20: note = Target: ANGPTL4; (+) strand; PAM type: NRG; PAM sequence: TAG
  source 1..20: mol_type = other DNA
ctctgggaggctgaggtggg

SEQ ID NO: 12978 - DNA, 20 bp, synthetic construct
  misc_feature 1..20: note = Description of Artificial Sequence: Synthetic oligonucleotide
  misc_feature 1..20: note = Target: ANGPTL4; (+) strand; PAM type: NRG; PAM sequence: AAG
  source 1..20: mol_type = other DNA
ggctgaggtgggtagatcac

SEQ ID NO: 12979 - DNA, 20 bp, synthetic construct
  misc_feature 1..20: note = Description of Artificial Sequence: Synthetic oligonucleotide
  misc_feature 1..20: note = Target: ANGPTL4; (+) strand; PAM type: NRG; PAM sequence: AGG
  source 1..20: mol_type = other DNA
gctgaggtgggtagatcaca

SEQ ID NO: 12980 - DNA, 20 bp, synthetic construct
  misc_feature 1..20: note = Description of Artificial Sequence: Synthetic oligonucleotide
  misc_feature 1..20: note = Target: ANGPTL4; (+) strand; PAM type: NRG; PAM sequence: CAG
  source 1..20: mol_type = other DNA
aggtgggtagatcacaaggt

SEQ ID NO: 12981 - DNA, 20 bp, synthetic construct
  misc_feature 1..20: note = Description of Artificial Sequence: Synthetic oligonucleotide
  misc_feature 1..20: note = Target: ANGPTL4; (+) strand; PAM type: NRG; PAM sequence: AGG
  source 1..20: mol_type = other DNA
ggtgggtagatcacaaggtc

SEQ ID NO: 12982 - DNA, 20 bp, synthetic construct
  misc_feature 1..20: note = Description of Artificial Sequence: Synthetic oligonucleotide
  misc_feature 1..20: note = Target: ANGPTL4; (+) strand; PAM type: NRG; PAM sequence: GAG
  source 1..20: mol_type = other DNA
tgggtagatcacaaggtcag

SEQ ID NO: 12983 - DNA, 20 bp, synthetic construct
  misc_feature 1..20: note = Description of Artificial Sequence: Synthetic oligonucleotide
  misc_feature 1..20: note = Target: ANGPTL4; (+) strand; PAM type: NRG; PAM sequence: AAG
  source 1..20: mol_type = other DNA
gatcacaaggtcaggagatc

SEQ ID NO: 12984 - DNA, 20 bp, synthetic construct
  misc_feature 1..20: note = Description of Artificial Sequence: Synthetic oligonucleotide
  misc_feature 1..20: note = Target: ANGPTL4; (+) strand; PAM type: NRG; PAM sequence: TGG
  source 1..20: mol_type = other DNA
tcaggagatcaagaccatac

SEQ ID NO: 12985 - DNA, 20 bp, synthetic construct
  misc_feature 1..20: note = Description of Artificial Sequence: Synthetic oligonucleotide
  misc_feature 1..20: note = Target: ANGPTL4; (+) strand; PAM type: NRG; PAM sequence: CGG
  source 1..20: mol_type = other DNA
caagaccatactggctgaca

SEQ ID NO: 12986 - DNA, 20 bp, synthetic construct
  misc_feature 1..20: note = Description of Artificial Sequence: Synthetic oligonucleotide
  misc_feature 1..20: note = Target: ANGPTL4; (+) strand; PAM type: NRG; PAM sequence: TAG
  source 1..20: mol_type = other DNA
ctactaaaaatacaaaaaat

SEQ ID NO: 12987 - DNA, 20 bp, synthetic construct
  misc_feature 1..20: note = Description of Artificial Sequence: Synthetic oligonucleotide
  misc_feature 1..20: note = Target: ANGPTL4; (+) strand; PAM type: NRG; PAM sequence: CAG
  source 1..20: mol_type = other DNA
taaaaatacaaaaaattagc

SEQ ID NO: 12988 - DNA, 20 bp, synthetic construct
  misc_feature 1..20: note = Description of Artificial Sequence: Synthetic oligonucleotide
  misc_feature 1..20: note = Target: ANGPTL4; (+) strand; PAM type: NRG; PAM sequence: AGG
  source 1..20: mol_type = other DNA
aaaaatacaaaaaattagcc

SEQ ID NO: 12989 - DNA, 20 bp, synthetic construct
  misc_feature 1..20: note = Description of Artificial Sequence: Synthetic oligonucleotide
  misc_feature 1..20: note = Target: ANGPTL4; (+) strand; PAM type: NRG; PAM sequence: TGG
  source 1..20: mol_type = other DNA
tacaaaaaattagccaggca

SEQ ID NO: 12990 - DNA, 20 bp, synthetic construct
  misc_feature 1..20: note = Description of Artificial Sequence: Synthetic oligonucleotide
  misc_feature 1..20: note = Target: ANGPTL4; (+) strand; PAM type: NRG; PAM sequence: TGG
  source 1..20: mol_type = other DNA
aaaaaattagccaggcatgg

SEQ ID NO: 12991 - DNA, 20 bp, synthetic construct
  misc_feature 1..20: note = Description of Artificial Sequence: Synthetic oligonucleotide
  misc_feature 1..20: note = Target: ANGPTL4; (+) strand; PAM type: NRG; PAM sequence: TAG
  source 1..20: mol_type = other DNA
ggcatggtggcacatgcccg

SEQ ID NO: 12992 - DNA, 20 bp, synthetic construct
  misc_feature 1..20: note = Description of Artificial Sequence: Synthetic oligonucleotide
  misc_feature 1..20: note = Target: ANGPTL4; (+) strand; PAM type: NRG; PAM sequence: CAG
  source 1..20: mol_type = other DNA
gtggcacatgcccgtagtcc

SEQ ID NO: 12993 - DNA, 20 bp, synthetic construct
  misc_feature 1..20: note = Description of Artificial Sequence: Synthetic oligonucleotide
  misc_feature 1..20: note = Target: ANGPTL4; (+) strand; PAM type: NRG; PAM sequence: CGG
  source 1..20: mol_type = other DNA
tgcccgtagtcccagctatt

SEQ ID NO: 12994 - DNA, 20 bp, synthetic construct
  misc_feature 1..20: note = Description of Artificial Sequence: Synthetic oligonucleotide
  misc_feature 1..20: note = Target: ANGPTL4; (+) strand; PAM type: NRG; PAM sequence: GGG
  source 1..20: mol_type = other DNA
gcccgtagtcccagctattc

SEQ ID NO: 12995 - DNA, 20 bp, synthetic construct
  misc_feature 1..20: note = Description of Artificial Sequence: Synthetic oligonucleotide
  misc_feature 1..20: note = Target: ANGPTL4; (+) strand; PAM type: NRG; PAM sequence: GAG
  source 1..20: mol_type = other DNA
ccgtagtcccagctattcgg

SEQ ID NO: 12996 - DNA, 20 bp, synthetic construct
  misc_feature 1..20: note = Description of Artificial Sequence: Synthetic oligonucleotide
  misc_feature 1..20: note = Target: ANGPTL4; (+) strand; PAM type: NRG; PAM sequence: AGG
  source 1..20: mol_type = other DNA
cgtagtcccagctattcggg

SEQ ID NO: 12997 - DNA, 20 bp, synthetic construct
  misc_feature 1..20: note = Description of Artificial Sequence: Synthetic oligonucleotide
  misc_feature 1..20: note = Target: ANGPTL4; (+) strand; PAM type: NRG; PAM sequence: AAG
  source 1..20: mol_type = other DNA
tcccagctattcgggaggct

SEQ ID NO: 12998 - DNA, 20 bp, synthetic construct
  misc_feature 1..20: note = Description of Artificial Sequence: Synthetic oligonucleotide
  misc_feature 1..20: note = Target: ANGPTL4; (+) strand; PAM type: NRG; PAM sequence: AGG
  source 1..20: mol_type = other DNA
cccagctattcgggaggcta

SEQ ID NO: 12999 - DNA, 20 bp, synthetic construct
  misc_feature 1..20: note = Description of Artificial Sequence: Synthetic oligonucleotide
  misc_feature 1..20: note = Target: ANGPTL4; (+) strand; PAM type: NRG; PAM sequence: CAG
  source 1..20: mol_type = other DNA
agctattcgggaggctaagg

SEQ ID NO: 13000 - DNA, 20 bp, synthetic construct
  misc_feature 1..20: note = Description of Artificial Sequence: Synthetic oligonucleotide
  misc_feature 1..20: note = Target: ANGPTL4; (+) strand; PAM type: NRG; PAM sequence: AGG
  source 1..20: mol_type = other DNA
gctattcgggaggctaaggc

SEQ ID NO: 13001 - DNA, 20 bp, synthetic construct
  misc_feature 1..20: note = Description of Artificial Sequence: Synthetic oligonucleotide
  misc_feature 1..20: note = Target: ANGPTL4; (+) strand; PAM type: NRG; PAM sequence: GAG
  source 1..20: mol_type = other DNA
tattcgggaggctaaggcag

SEQ ID NO: 13002 - DNA, 20 bp, synthetic construct
  misc_feature 1..20: note = Description of Artificial Sequence: Synthetic oligonucleotide
  misc_feature 1..20: note = Target: ANGPTL4; (+) strand; PAM type: NRG; PAM sequence: TGG
  source 1..20: mol_type = other DNA
gcaggagaatcacttgaacc

SEQ ID NO: 13003 - DNA, 20 bp, synthetic construct
  misc_feature 1..20: note = Description of Artificial Sequence: Synthetic oligonucleotide
  misc_feature 1..20: note = Target: ANGPTL4; (+) strand; PAM type: NRG; PAM sequence: GGG
  source 1..20: mol_type = other DNA
caggagaatcacttgaacct

SEQ ID NO: 13004 - DNA, 20 bp, synthetic construct
  misc_feature 1..20: note = Description of Artificial Sequence: Synthetic oligonucleotide
  misc_feature 1..20: note = Target: ANGPTL4; (+) strand; PAM type: NRG; PAM sequence: GAG
  source 1..20: mol_type = other DNA
ggagaatcacttgaacctgg

SEQ ID NO: 13005 - DNA, 20 bp, synthetic construct
  misc_feature 1..20: note = Description of Artificial Sequence: Synthetic oligonucleotide
  misc_feature 1..20: note = Target: ANGPTL4; (+) strand; PAM type: NRG; PAM sequence: AGG
  source 1..20: mol_type = other DNA
gagaatcacttgaacctggg

SEQ ID NO: 13006 - DNA, 20 bp, synthetic construct
  misc_feature 1..20: note = Description of Artificial Sequence: Synthetic oligonucleotide
  misc_feature 1..20: note = Target: ANGPTL4; (+) strand; PAM type: NRG; PAM sequence: CGG
  source 1..20: mol_type = other DNA
aatcacttgaacctgggagg

SEQ ID NO: 13007 - DNA, 20 bp, synthetic construct
  misc_feature 1..20: note = Description of Artificial Sequence: Synthetic oligonucleotide
  misc_feature 1..20: note = Target: ANGPTL4; (+) strand; PAM type: NRG; PAM sequence: GAG
  source 1..20: mol_type = other DNA
tcacttgaacctgggaggcg

SEQ ID NO: 13008 - DNA, 20 bp, synthetic construct
  misc_feature 1..20: note = Description of Artificial Sequence: Synthetic oligonucleotide
  misc_feature 1..20: note = Target: ANGPTL4; (+) strand; PAM type: NRG; PAM sequence: AGG
  source 1..20: mol_type = other DNA
cacttgaacctgggaggcgg

SEQ ID NO: 13009 - DNA, 20 bp, synthetic construct
  misc_feature 1..20: note = Description of Artificial Sequence: Synthetic oligonucleotide
  misc_feature 1..20: note = Target: ANGPTL4; (+) strand; PAM type: NRG; PAM sequence: CAG
  source 1..20: mol_type = other DNA
aacctgggaggcggaggttg

SEQ ID NO: 13010 - DNA, 20 bp, synthetic construct
  misc_feature 1..20: note = Description of Artificial Sequence: Synthetic oligonucleotide
  misc_feature 1..20: note = Target: ANGPTL4; (+) strand; PAM type: NRG; PAM sequence: GAG
  source 1..20: mol_type = other DNA
tgggaggcggaggttgcagt

SEQ ID NO: 13011 - DNA, 20 bp, synthetic construct
  misc_feature 1..20: note = Description of Artificial Sequence: Synthetic oligonucleotide
  misc_feature 1..20: note = Target: ANGPTL4; (+) strand; PAM type: NRG; PAM sequence: GAG
  source 1..20: mol_type = other DNA
ggcggaggttgcagtgagct

SEQ ID NO: 13012 - DNA, 20 bp, synthetic construct
  misc_feature 1..20: note = Description of Artificial Sequence: Synthetic oligonucleotide
  misc_feature 1..20: note = Target: ANGPTL4; (+) strand; PAM type: NRG; PAM sequence: CAG
  source 1..20: mol_type = other DNA
gagattgcaccactgcactc

SEQ ID NO: 13013 - DNA, 20 bp, synthetic construct
  misc_feature 1..20: note = Description of Artificial Sequence: Synthetic oligonucleotide
  misc_feature 1..20: note = Target: ANGPTL4; (+) strand; PAM type: NRG; PAM sequence: TGG
  source 1..20: mol_type = other DNA
tgcaccactgcactccagcc

SEQ ID NO: 13014 - DNA, 20 bp, synthetic construct
  misc_feature 1..20: note = Description of Artificial Sequence: Synthetic oligonucleotide
  misc_feature 1..20: note = Target: ANGPTL4; (+) strand; PAM type: NRG; PAM sequence: GGG
  source 1..20: mol_type = other DNA
gcaccactgcactccagcct

SEQ ID NO: 13015 - DNA, 20 bp, synthetic construct
  misc_feature 1..20: note = Description of Artificial Sequence: Synthetic oligonucleotide
  misc_feature 1..20: note = Target: ANGPTL4; (+) strand; PAM type: NRG; PAM sequence: CAG
  source 1..20: mol_type = other DNA
ctgcactccagcctgggtga

SEQ ID NO: 13016 - DNA, 20 bp, synthetic construct
  misc_feature 1..20: note = Description of Artificial Sequence: Synthetic oligonucleotide
  misc_feature 1..20: note = Target: ANGPTL4; (+) strand; PAM type: NRG; PAM sequence: GAG
  source 1..20: mol_type = other DNA
gcactccagcctgggtgaca

SEQ ID NO: 13017 - DNA, 20 bp, synthetic construct
  misc_feature 1..20: note = Description of Artificial Sequence: Synthetic oligonucleotide
  misc_feature 1..20: note = Target: ANGPTL4; (+) strand; PAM type: NRG; PAM sequence: AAG
  source 1..20: mol_type = other DNA
tccagcctgggtgacagagc

SEQ ID NO: 13018 - DNA, 20 bp, synthetic construct
  misc_feature 1..20: note = Description of Artificial Sequence: Synthetic oligonucleotide
  misc_feature 1..20: note = Target: ANGPTL4; (+) strand; PAM type: NRG; PAM sequence: AAG
  source 1..20: mol_type = other DNA
agcaagactctgtctcaaaa

SEQ ID NO: 13019 - DNA, 20 bp, synthetic construct
  misc_feature 1..20: note = Description of Artificial Sequence: Synthetic oligonucleotide
  misc_feature 1..20: note = Target: ANGPTL4; (+) strand; PAM type: NRG; PAM sequence: AAG
  source 1..20: mol_type = other DNA
agactctgtctcaaaaaaga

SEQ ID NO: 13020 - DNA, 20 bp, synthetic construct
  misc_feature 1..20: note = Description of Artificial Sequence: Synthetic oligonucleotide
  misc_feature 1..20: note = Target: ANGPTL4; (+) strand; PAM type: NRG; PAM sequence: AAG
  source 1..20: mol_type = other DNA
tctcaaaaaagaaagaaaaa

SEQ ID NO: 13021 - DNA, 20 bp, synthetic construct
  misc_feature 1..20: note = Description of Artificial Sequence: Synthetic oligonucleotide
  misc_feature 1..20: note = Target: ANGPTL4; (+) strand; PAM type: NRG; PAM sequence: AAG
  source 1..20: mol_type = other DNA
aaaaaagaaagaaaaaaaga

SEQ ID NO: 13022 - DNA, 20 bp, synthetic construct
  misc_feature 1..20: note = Description of Artificial Sequence: Synthetic oligonucleotide
  misc_feature 1..20: note = Target: ANGPTL4; (+) strand; PAM type: NRG; PAM sequence: AAG
  source 1..20: mol_type = other DNA
agaaagaaaaaaagaaagaa

SEQ ID NO: 13023 - DNA, 20 bp, synthetic construct
  misc_feature 1..20: note = Description of Artificial Sequence: Synthetic oligonucleotide
  misc_feature 1..20: note = Target: ANGPTL4; (+) strand; PAM type: NRG; PAM sequence: TGG
  source 1..20: mol_type = other DNA
gaaagaaaagaaaaacacca

SEQ ID NO: 13024 - DNA, 20 bp, synthetic construct
  misc_feature 1..20: note = Description of Artificial Sequence: Synthetic oligonucleotide
  misc_feature 1..20: note = Target: ANGPTL4; (+) strand; PAM type: NRG; PAM sequence: CAG
  source 1..20: mol_type = other DNA
agaaaagaaaaacaccatgg

SEQ ID NO: 13025 - DNA, 20 bp, synthetic construct
  misc_feature 1..20: note = Description of Artificial Sequence: Synthetic oligonucleotide
  misc_feature 1..20: note = Target: ANGPTL4; (+) strand; PAM type: NRG; PAM sequence: AGG
  source 1..20: mol_type = other DNA
gaaaagaaaaacaccatggc

SEQ ID NO: 13026 - DNA, 20 bp, synthetic construct
  misc_feature 1..20: note = Description of Artificial Sequence: Synthetic oligonucleotide
  misc_feature 1..20: note = Target: ANGPTL4; (+) strand; PAM type: NRG; PAM sequence: AAG
  source 1..20: mol_type = other DNA
caccatggcaggaaactaac

SEQ ID NO: 13027 - DNA, 20 bp, synthetic construct
  misc_feature 1..20: note = Description of Artificial Sequence: Synthetic oligonucleotide
  misc_feature 1..20: note = Target: ANGPTL4; (+) strand; PAM type: NRG; PAM sequence: AGG
  source 1..20: mol_type = other DNA
accatggcaggaaactaaca

SEQ ID NO: 13028 - DNA, 20 bp, synthetic construct
  misc_feature 1..20: note = Description of Artificial Sequence: Synthetic oligonucleotide
  misc_feature 1..20: note = Target: ANGPTL4; (+) strand; PAM type: NRG; PAM sequence: GGG
  source 1..20: mol_type = other DNA
ccatggcaggaaactaacaa

SEQ ID NO: 13029 - DNA, 20 bp, synthetic construct
  misc_feature 1..20: note = Description of Artificial Sequence: Synthetic oligonucleotide
  misc_feature 1..20: note = Target: ANGPTL4; (+) strand; PAM type: NRG; PAM sequence: GGG
  source 1..20: mol_type = other DNA
catggcaggaaactaacaag

SEQ ID NO: 13030 - DNA, 20 bp, synthetic construct
  misc_feature 1..20: note = Description of Artificial Sequence: Synthetic oligonucleotide
  misc_feature 1..20: note = Target: ANGPTL4; (+) strand; PAM type: NRG; PAM sequence: CAG
  source 1..20: mol_type = other DNA
gcaggaaactaacaaggggc

SEQ ID NO: 13031 - DNA, 20 bp, synthetic construct
  misc_feature 1..20: note = Description of Artificial Sequence: Synthetic oligonucleotide
  misc_feature 1..20: note = Target: ANGPTL4; (+) strand; PAM type: NRG; PAM sequence: AGG
  source 1..20: mol_type = other DNA
caggaaactaacaaggggcc

SEQ ID NO: 13032 - DNA, 20 bp, synthetic construct
  misc_feature 1..20: note = Description of Artificial Sequence: Synthetic oligonucleotide
  misc_feature 1..20: note = Target: ANGPTL4; (+) strand; PAM type: NRG; PAM sequence: AAG
  source 1..20: mol_type = other DNA
gaaactaacaaggggccagg

SEQ ID NO: 13033 - DNA, 20 bp, synthetic construct
  misc_feature 1..20: note = Description of Artificial Sequence: Synthetic oligonucleotide
  misc_feature 1..20: note = Target: ANGPTL4; (+) strand; PAM type: NRG; PAM sequence: TGG
  source 1..20: mol_type = other DNA
ctaacaaggggccaggaagc

SEQ ID NO: 13034 - DNA, 20 bp, synthetic construct
  misc_feature 1..20: note = Description of Artificial Sequence: Synthetic oligonucleotide
  misc_feature 1..20: note = Target: ANGPTL4; (+) strand; PAM type: NRG; PAM sequence: GGG
  source 1..20: mol_type = other DNA
taacaaggggccaggaagct

SEQ ID NO: 13035 - DNA, 20 bp, synthetic construct
  misc_feature 1..20: note = Description of Artificial Sequence: Synthetic oligonucleotide
  misc_feature 1..20: note = Target: ANGPTL4; (+) strand; PAM type: NRG; PAM sequence: TGG
  source 1..20: mol_type = other DNA
aggaagctgggatgtgaacc

SEQ ID NO: 13036 - DNA, 20 bp, synthetic construct
  misc_feature 1..20: note = Description of Artificial Sequence: Synthetic oligonucleotide
  misc_feature 1..20: note = Target: ANGPTL4; (+) strand; PAM type: NRG; PAM sequence: CAG
  source 1..20: mol_type = other DNA
aacctggacctgttaaactc

SEQ ID NO: 13037 - DNA, 20 bp, synthetic construct
  misc_feature 1..20: note = Description of Artificial Sequence: Synthetic oligonucleotide
  misc_feature 1..20: note = Target: ANGPTL4; (+) strand; PAM type: NRG; PAM sequence: GAG
  source 1..20: mol_type = other DNA
cctggacctgttaaactcca

SEQ ID NO: 13038 - DNA, 20 bp, synthetic construct
  misc_feature 1..20: note = Description of Artificial Sequence: Synthetic oligonucleotide
  misc_feature 1..20: note = Target: ANGPTL4; (+) strand; PAM type: NRG; PAM sequence: CAG
  source 1..20: mol_type = other DNA
cctgttaaactccagagctg

SEQ ID NO: 13039 - DNA, 20 bp, synthetic construct
  misc_feature 1..20: note = Description of Artificial Sequence: Synthetic oligonucleotide
  misc_feature 1..20: note = Target: ANGPTL4; (+) strand; PAM type: NRG; PAM sequence: TGG
  source 1..20: mol_type = other DNA
tgtaaatcacatccctctcc

SEQ ID NO: 13040 - DNA, 20 bp, synthetic construct
  misc_feature 1..20: note = Description of Artificial Sequence: Synthetic oligonucleotide
  misc_feature 1..20: note = Target: ANGPTL4; (+) strand; PAM type: NRG; PAM sequence: CAG
  source 1..20: mol_type = other DNA
cacatccctctcctggacca

SEQ ID NO: 13041 - DNA, 20 bp, synthetic construct
  misc_feature 1..20: note = Description of Artificial Sequence: Synthetic oligonucleotide
  misc_feature 1..20: note = Target: ANGPTL4; (+) strand; PAM type: NRG; PAM sequence: AGG
  source 1..20: mol_type = other DNA
acatccctctcctggaccac

SEQ ID NO: 13042 - DNA, 20 bp, synthetic construct
  misc_feature 1..20: note = Description of Artificial Sequence: Synthetic oligonucleotide
  misc_feature 1..20: note = Target: ANGPTL4; (+) strand; PAM type: NRG; PAM sequence: GAG
  source 1..20: mol_type = other DNA
atccctctcctggaccacag

SEQ ID NO: 13043 - DNA, 20 bp, synthetic construct
  misc_feature 1..20: note = Description of Artificial Sequence: Synthetic oligonucleotide
  misc_feature 1..20: note = Target: ANGPTL4; (+) strand; PAM type: NRG; PAM sequence: TGG
  source 1..20: mol_type = other DNA
cctggaccacaggagctcac

SEQ ID NO: 13044 - DNA, 20 bp, synthetic construct
  misc_feature 1..20: note = Description of Artificial Sequence: Synthetic oligonucleotide
  misc_feature 1..20: note = Target: ANGPTL4; (+) strand; PAM type: NRG; PAM sequence: CAG
  source 1..20: mol_type = other DNA
ccacaggagctcactggccc

SEQ ID NO: 13045 - DNA, 20 bp, synthetic construct
  misc_feature 1..20: note = Description of Artificial Sequence: Synthetic oligonucleotide
  misc_feature 1..20: note = Target: ANGPTL4; (+) strand; PAM type: NRG; PAM sequence: TGG
  source 1..20: mol_type = other DNA
ctggccccagttcctgcatt

SEQ ID NO: 13046 - DNA, 20 bp, synthetic construct
  misc_feature 1..20: note = Description of Artificial Sequence: Synthetic oligonucleotide
  misc_feature 1..20: note = Target: ANGPTL4; (+) strand; PAM type: NRG; PAM sequence: TGG
  source 1..20: mol_type = other DNA
cagttcctgcatttggaaaa

SEQ ID NO: 13047 - DNA, 20 bp, synthetic construct
  misc_feature 1..20: note = Description of Artificial Sequence: Synthetic oligonucleotide
  misc_feature 1..20: note = Target: ANGPTL4; (+) strand; PAM type: NRG; PAM sequence: GGG
  source 1..20: mol_type = other DNA
agttcctgcatttggaaaat

SEQ ID NO: 13048 - DNA, 20 bp, synthetic construct
  misc_feature 1..20: note = Description of Artificial Sequence: Synthetic oligonucleotide
  misc_feature 1..20: note = Target: ANGPTL4; (+) strand; PAM type: NRG; PAM sequence: GGG
  source 1..20: mol_type = other DNA
gttcctgcatttggaaaatg

SEQ ID NO: 13049 - DNA, 20 bp, synthetic construct
  misc_feature 1..20: note = Description of Artificial Sequence: Synthetic oligonucleotide
  misc_feature 1..20: note = Target: ANGPTL4; (+) strand; PAM type: NRG; PAM sequence: TGG
  source 1..20: mol_type = other DNA
ctgcatttggaaaatgggga

SEQ ID NO: 13050 - DNA, 20 bp, synthetic construct
  misc_feature 1..20: note = Description of Artificial Sequence: Synthetic oligonucleotide
  misc_feature 1..20: note = Target: ANGPTL4; (+) strand; PAM type: NRG; PAM sequence: TGG
  source 1..20: mol_type = other DNA
tccatgccaccatcccttcc

SEQ ID NO: 13051 - DNA, 20 bp, synthetic construct
  misc_feature 1..20: note = Description of Artificial Sequence: Synthetic oligonucleotide
  misc_feature 1..20: note = Target: ANGPTL4; (+) strand; PAM type: NRG; PAM sequence: TGG
  source 1..20: mol_type = other DNA
accatcccttcctggcctca

SEQ ID NO: 13052 - DNA, 20 bp, synthetic construct
  misc_feature 1..20: note = Description of Artificial Sequence: Synthetic oligonucleotide
  misc_feature 1..20: note = Target: ANGPTL4; (+) strand; PAM type: NRG; PAM sequence: TGG
  source 1..20: mol_type = other DNA
cccttcctggcctcatggtg

SEQ ID NO: 13053 - DNA, 20 bp, synthetic construct
  misc_feature 1..20: note = Description of Artificial Sequence: Synthetic oligonucleotide
  misc_feature 1..20: note = Target: ANGPTL4; (+) strand; PAM type: NRG; PAM sequence: GGG
  source 1..20: mol_type = other DNA
ccttcctggcctcatggtgt

SEQ ID NO: 13054 - DNA, 20 bp, synthetic construct
  misc_feature 1..20: note = Description of Artificial Sequence: Synthetic oligonucleotide
  misc_feature 1..20: note = Target: ANGPTL4; (+) strand; PAM type: NRG; PAM sequence: GGG
  source 1..20: mol_type = other DNA
cttcctggcctcatggtgtg

SEQ ID NO: 13055 - DNA, 20 bp, synthetic construct
  misc_feature 1..20: note = Description of Artificial Sequence: Synthetic oligonucleotide
  misc_feature 1..20: note = Target: ANGPTL4; (+) strand; PAM type: NRG; PAM sequence: GAG
  source 1..20: mol_type = other DNA
tcctggcctcatggtgtggg

SEQ ID NO: 13056 - DNA, 20 bp, synthetic construct
  misc_feature 1..20: note = Description of Artificial Sequence: Synthetic oligonucleotide
  misc_feature 1..20: note = Target: ANGPTL4; (+) strand; PAM type: NRG; PAM sequence: AGG
  source 1..20: mol_type = other DNA
cctggcctcatggtgtgggg

SEQ ID NO: 13057 - DNA, 20 bp, synthetic construct
  misc_feature 1..20: note = Description of Artificial Sequence: Synthetic oligonucleotide
  misc_feature 1..20: note = Target: ANGPTL4; (+) strand; PAM type: NRG; PAM sequence: GGG
  source 1..20: mol_type = other DNA
ctggcctcatggtgtgggga

SEQ ID NO: 13058 - DNA, 20 bp, synthetic construct
  misc_feature 1..20: note = Description of Artificial Sequence: Synthetic oligonucleotide
  misc_feature 1..20: note = Target: ANGPTL4; (+) strand; PAM type: NRG; PAM sequence: GGG
  source 1..20: mol_type = other DNA
tggcctcatggtgtggggag

SEQ ID NO: 13059 - DNA, 20 bp, synthetic construct
  misc_feature 1..20: note = Description of Artificial Sequence: Synthetic oligonucleotide
  misc_feature 1..20: note = Target: ANGPTL4; (+) strand; PAM type: NRG; PAM sequence: GGG
  source 1..20: mol_type = other DNA
ggcctcatggtgtggggagg

SEQ ID NO: 13060 - DNA, 20 bp, synthetic construct
  misc_feature 1..20: note = Description of Artificial Sequence: Synthetic oligonucleotide
  misc_feature 1..20: note = Target: ANGPTL4; (+) strand; PAM type: NRG; PAM sequence: TGG
  source 1..20: mol_type = other DNA
ctcatggtgtggggaggggg

SEQ ID NO: 13061 - DNA, 20 bp, synthetic construct
  misc_feature 1..20: note = Description of Artificial Sequence: Synthetic oligonucleotide
  misc_feature 1..20: note = Target: ANGPTL4; (+) strand; PAM type: NRG; PAM sequence: AAG
  source 1..20: mol_type = other DNA
ggtgtggggagggggtggta

SEQ ID NO: 13062 - DNA, 20 bp, synthetic construct
  misc_feature 1..20: note = Description of Artificial Sequence: Synthetic oligonucleotide
  misc_feature 1..20: note = Target: ANGPTL4; (+) strand; PAM type: NRG; PAM sequence: AAG
  source 1..20: mol_type = other DNA
gggggtggtaaagaattaat

SEQ ID NO: 13063 - DNA, 20 bp, synthetic construct
  misc_feature 1..20: note = Description of Artificial Sequence: Synthetic oligonucleotide
  misc_feature 1..20: note = Target: ANGPTL4; (+) strand; PAM type: NRG; PAM sequence: AGG
  source 1..20: mol_type = other DNA
ggggtggtaaagaattaata

SEQ ID NO: 13064 - DNA, 20 bp, synthetic construct
  misc_feature 1..20: note = Description of Artificial Sequence: Synthetic oligonucleotide
  misc_feature 1..20: note = Target: ANGPTL4; (+) strand; PAM type: NRG; PAM sequence: CAG
  source 1..20: mol_type = other DNA
taaggcattaatattcatca

SEQ ID NO: 13065 - DNA, 20 bp, synthetic construct
  misc_feature 1..20: note = Description of Artificial Sequence: Synthetic oligonucleotide
  misc_feature 1..20: note = Target: ANGPTL4; (+) strand; PAM type: NRG; PAM sequence: AGG
  source 1..20: mol_type = other DNA
aaggcattaatattcatcac

SEQ ID NO: 13066 - DNA, 20 bp, synthetic construct
  misc_feature 1..20: note = Description of Artificial Sequence: Synthetic oligonucleotide
  misc_feature 1..20: note = Target: ANGPTL4; (+) strand; PAM type: NRG; PAM sequence: TGG
  source 1..20: mol_type = other DNA
cattaatattcatcacaggc

SEQ ID NO: 13067 - DNA, 20 bp, synthetic construct
  misc_feature 1..20: note = Description of Artificial Sequence: Synthetic oligonucleotide
  misc_feature 1..20: note = Target: ANGPTL4; (+) strand; PAM type: NRG; PAM sequence: GGG
  source 1..20: mol_type = other DNA
attaatattcatcacaggct

SEQ ID NO: 13068 - DNA, 20 bp, synthetic construct
  misc_feature 1..20: note = Description of Artificial Sequence: Synthetic oligonucleotide
  misc_feature 1..20: note = Target: ANGPTL4; (+) strand; PAM type: NRG; PAM sequence: CAG
  source 1..20: mol_type = other DNA
tattcatcacaggctgggtc

SEQ ID NO: 13069 - DNA, 20 bp, synthetic construct
  misc_feature 1..20: note = Description of Artificial Sequence: Synthetic oligonucleotide
  misc_feature 1..20: note = Target: ANGPTL4; (+) strand; PAM type: NRG; PAM sequence: CAG
  source 1..20: mol_type = other DNA
gtgcctcgcgactgtaatcc

SEQ ID NO: 13070 - DNA, 20 bp, synthetic construct
  misc_feature 1..20: note = Description of Artificial Sequence: Synthetic oligonucleotide
  misc_feature 1..20: note = Target: ANGPTL4; (+) strand; PAM type: NRG; PAM sequence: TGG
  source 1..20: mol_type = other DNA
cgactgtaatcccagctctt

SEQ ID NO: 13071 - DNA, 20 bp, synthetic construct
  misc_feature 1..20: note = Description of Artificial Sequence: Synthetic oligonucleotide
  misc_feature 1..20: note = Target: ANGPTL4; (+) strand; PAM type: NRG; PAM sequence: GGG
  source 1..20: mol_type = other DNA
gactgtaatcccagctcttt

SEQ ID NO: 13072 - DNA, 20 bp, synthetic construct
  misc_feature 1..20: note = Description of Artificial Sequence: Synthetic oligonucleotide
  misc_feature 1..20: note = Target: ANGPTL4; (+) strand; PAM type: NRG; PAM sequence: GAG
  source 1..20: mol_type = other DNA
ctgtaatcccagctctttgg

SEQ ID NO: 13073 - DNA, 20 bp, synthetic construct
  misc_feature 1..20: note = Description of Artificial Sequence: Synthetic oligonucleotide
  misc_feature 1..20: note = Target: ANGPTL4; (+) strand; PAM type: NRG; PAM sequence: AGG
  source 1..20: mol_type = other DNA
tgtaatcccagctctttggg

SEQ ID NO: 13074 - DNA, 20 bp, synthetic construct
  misc_feature 1..20: note = Description of Artificial Sequence: Synthetic oligonucleotide
  misc_feature 1..20: note = Target: ANGPTL4; (+) strand; PAM type: NRG; PAM sequence: GAG
  source 1..20: mol_type = other DNA
tcccagctctttgggaggct

SEQ ID NO: 13075 - DNA, 20 bp, synthetic construct
  misc_feature 1..20: note = Description of Artificial Sequence: Synthetic oligonucleotide
  misc_feature 1..20: note = Target: ANGPTL4; (+) strand; PAM type: NRG; PAM sequence: AGG
  source 1..20: mol_type = other DNA
cccagctctttgggaggctg

SEQ ID NO: 13076 - DNA, 20 bp, synthetic construct
  misc_feature 1..20: note = Description of Artificial Sequence: Synthetic oligonucleotide
  misc_feature 1..20: note = Target: ANGPTL4; (+) strand; PAM type: NRG; PAM sequence: TGG
  source 1..20: mol_type = other DNA
gctctttgggaggctgaggc

SEQ ID NO: 13077 - DNA, 20 bp, synthetic construct
  misc_feature 1..20: note = Description of Artificial Sequence: Synthetic oligonucleotide
  misc_feature 1..20: note = Target: ANGPTL4; (+) strand; PAM type: NRG; PAM sequence: GAG
  source 1..20: mol_type = other DNA
tctttgggaggctgaggctg

SEQ ID NO: 13078 - DNA, 20 bp, synthetic construct
  misc_feature 1..20: note = Description of Artificial Sequence: Synthetic oligonucleotide
  misc_feature 1..20: note = Target: ANGPTL4; (+) strand; PAM type: NRG; PAM sequence: AGG
  source 1..20: mol_type = other DNA
ctttgggaggctgaggctgg

SEQ ID NO: 13079 - DNA, 20 bp, synthetic construct
  misc_feature 1..20: note = Description of Artificial Sequence: Synthetic oligonucleotide
  misc_feature 1..20: note = Target: ANGPTL4; (+) strand; PAM type: NRG; PAM sequence: TGG
  source 1..20: mol_type = other DNA
aggctgaggctggaggacct

SEQ ID NO: 13080 - DNA, 20 bp, synthetic construct
  misc_feature 1..20: note = Description of Artificial Sequence: Synthetic oligonucleotide
  misc_feature 1..20: note = Target: ANGPTL4; (+) strand; PAM type: NRG; PAM sequence: GAG
  source 1..20: mol_type = other DNA
gctgaggctggaggaccttg

SEQ ID NO: 13081 - DNA, 20 bp, synthetic construct
  misc_feature 1..20: note = Description of Artificial Sequence: Synthetic oligonucleotide
  misc_feature 1..20: note = Target: ANGPTL4; (+) strand; PAM type: NRG; PAM sequence: GAG
  source 1..20: mol_type = other DNA
gctggaggaccttggagttt

SEQ ID NO: 13082 - DNA, 20 bp, synthetic construct
  misc_feature 1..20: note = Description of Artificial Sequence: Synthetic oligonucleotide
  misc_feature 1..20: note = Target: ANGPTL4; (+) strand; PAM type: NRG; PAM sequence: CAG
  source 1..20: mol_type = other DNA
aggaccttggagtttgagac

SEQ ID NO: 13083 - DNA, 20 bp, synthetic construct
  misc_feature 1..20: note = Description of Artificial Sequence: Synthetic oligonucleotide
  misc_feature 1..20: note = Target: ANGPTL4; (+) strand; PAM type: NRG; PAM sequence: CAG
  source 1..20: mol_type = other DNA
tgagaccagcctacgcaaca

SEQ ID NO: 13084 - DNA, 20 bp, synthetic construct
  misc_feature 1..20: note = Description of Artificial Sequence: Synthetic oligonucleotide
  misc_feature 1..20: note = Target: ANGPTL4; (+) strand; PAM type: NRG; PAM sequence: AAG
  source 1..20: mol_type = other DNA
accagcctacgcaacacagc

SEQ ID NO: 13085 - DNA, 20 bp, synthetic construct
  misc_feature 1..20: note = Description of Artificial Sequence: Synthetic oligonucleotide
  misc_feature 1..20: note = Target: ANGPTL4; (+) strand; PAM type: NRG; PAM sequence: AAG
  source 1..20: mol_type = other DNA
ctctacgataaatttttaaa

SEQ ID NO: 13086 - DNA, 20 bp, synthetic construct
  misc_feature 1..20: note = Description of Artificial Sequence: Synthetic oligonucleotide
  misc_feature 1..20: note = Target: ANGPTL4; (+) strand; PAM type: NRG; PAM sequence: CGG
  source 1..20: mol_type = other DNA
cgataaatttttaaaaagtc

SEQ ID NO: 13087 - DNA, 20 bp, synthetic construct
  misc_feature 1..20: note = Description of Artificial Sequence: Synthetic oligonucleotide
  misc_feature 1..20: note = Target: ANGPTL4; (+) strand; PAM type: NRG; PAM sequence: GGG
  source 1..20: mol_type = other DNA
gataaatttttaaaaagtcc

SEQ ID NO: 13088 - DNA, 20 bp, synthetic construct
  misc_feature 1..20: note = Description of Artificial Sequence: Synthetic oligonucleotide
  misc_feature 1..20: note = Target: ANGPTL4; (+) strand; PAM type: NRG; PAM sequence: CAG
  source 1..20: mol_type = other DNA
atttttaaaaagtccgggtg

SEQ ID NO: 13089 - DNA, 20 bp, synthetic construct
  misc_feature 1..20: note = Description of Artificial Sequence: Synthetic oligonucleotide
  misc_feature 1..20: note = Target: ANGPTL4; (+) strand; PAM type: NRG; PAM sequence: TGG
  source 1..20: mol_type = other DNA
tttaaaaagtccgggtgcag

SEQ ID NO: 13090 - DNA, 20 bp, synthetic construct
  misc_feature 1..20: note = Description of Artificial Sequence: Synthetic oligonucleotide
  misc_feature 1..20: note = Target: ANGPTL4; (+) strand; PAM type: NRG; PAM sequence: CAG
  source 1..20: mol_type = other DNA
gtggctcatgcctataatcc

SEQ ID NO: 13091 - DNA, 20 bp, synthetic construct
  misc_feature 1..20: note = Description of Artificial Sequence: Synthetic oligonucleotide
  misc_feature 1..20: note = Target: ANGPTL4; (+) strand; PAM type: NRG; PAM sequence: TGG
  source 1..20: mol_type = other DNA
tgcctataatcccagcactt

SEQ ID NO: 13092 - DNA, 20 bp, synthetic construct
  misc_feature 1..20: note = Description of Artificial Sequence: Synthetic oligonucleotide
  misc_feature 1..20: note = Target: ANGPTL4; (+) strand; PAM type: NRG; PAM sequence: GGG
  source 1..20: mol_type = other DNA
gcctataatcccagcacttt

SEQ ID NO: 13093 - DNA, 20 bp, synthetic construct
  misc_feature 1..20: note = Description of Artificial Sequence: Synthetic oligonucleotide
  misc_feature 1..20: note = Target: ANGPTL4; (+) strand; PAM type: NRG; PAM sequence: GAG
  source 1..20: mol_type = other DNA
ctataatcccagcactttgg

SEQ ID NO: 13094 - DNA, 20 bp, synthetic construct
  misc_feature 1..20: note = Description of Artificial Sequence: Synthetic oligonucleotide
  misc_feature 1..20: note = Target: ANGPTL4; (+) strand; PAM type: NRG; PAM sequence: AGG
  source 1..20: mol_type = other DNA
tataatcccagcactttggg

SEQ ID NO: 13095 - DNA, 20 bp, synthetic construct
  misc_feature 1..20: note = Description of Artificial Sequence: Synthetic oligonucleotide
  misc_feature 1..20: note = Target: ANGPTL4; (+) strand; PAM type: NRG; PAM sequence: AAG
  source 1..20: mol_type = other DNA
tcccagcactttgggaggcc

SEQ ID NO: 13096 - DNA, 20 bp, synthetic construct
  misc_feature 1..20: note = Description of Artificial Sequence: Synthetic oligonucleotide
  misc_feature 1..20: note = Target: ANGPTL4; (+) strand; PAM type: NRG; PAM sequence: AGG
  source 1..20: mol_type = other DNA
cccagcactttgggaggcca

SEQ ID NO: 13097 - DNA, 20 bp, synthetic construct
  misc_feature 1..20: note = Description of Artificial Sequence: Synthetic oligonucleotide
  misc_feature 1..20: note = Target: ANGPTL4; (+) strand; PAM type: NRG; PAM sequence: CGG
  source 1..20: mol_type = other DNA
agcactttgggaggccaagg

SEQ ID NO: 13098 - DNA, 20 bp, synthetic construct
  misc_feature 1..20: note = Description of Artificial Sequence: Synthetic oligonucleotide
  misc_feature 1..20: note = Target: ANGPTL4; (+) strand; PAM type: NRG; PAM sequence: GGG
  source 1..20: mol_type = other DNA
gcactttgggaggccaaggc

SEQ ID NO: 13099 - DNA, 20 bp, synthetic construct
  misc_feature 1..20: note = Description of Artificial Sequence: Synthetic oligonucleotide
  misc_feature 1..20: note = Target: ANGPTL4; (+) strand; PAM type: NRG; PAM sequence: TGG
  source 1..20: mol_type = other DNA
ctttgggaggccaaggcggg

SEQ ID NO: 13100 - DNA, 20 bp, synthetic construct
  misc_feature 1..20: note = Description of Artificial Sequence: Synthetic oligonucleotide
  misc_feature 1..20: note = Target: ANGPTL4; (+) strand; PAM type: NRG; PAM sequence: GAG
  source 1..20: mol_type = other DNA
ggccaaggcgggtggatcat

SEQ ID NO: 13101 - DNA, 20 bp, synthetic construct
  misc_feature 1..20: note = Description of Artificial Sequence: Synthetic oligonucleotide
  misc_feature 1..20: note = Target: ANGPTL4; (+) strand; PAM type: NRG; PAM sequence: AGG
  source 1..20: mol_type = other DNA
gccaaggcgggtggatcatg

SEQ ID NO: 13102 - DNA, 20 bp, synthetic construct
  misc_feature 1..20: note = Description of Artificial Sequence: Synthetic oligonucleotide
  misc_feature 1..20: note = Target: ANGPTL4; (+) strand; PAM type: NRG; PAM sequence: TAG
  source 1..20: mol_type = other DNA
aggcgggtggatcatgaggt

SEQ ID NO: 13103 - DNA, 20 bp, synthetic construct
  misc_feature 1..20: note = Description of Artificial Sequence: Synthetic oligonucleotide
  misc_feature 1..20: note = Target: ANGPTL4; (+) strand; PAM type: NRG; PAM sequence: AGG
  source 1..20: mol_type = other DNA
ggcgggtggatcatgaggtt

SEQ ID NO: 13104 - DNA, 20 bp, synthetic construct
  misc_feature 1..20: note = Description of Artificial Sequence: Synthetic oligonucleotide
  misc_feature 1..20: note = Target: ANGPTL4; (+) strand; PAM type: NRG; PAM sequence: GAG
  source 1..20: mol_type = other DNA
cgggtggatcatgaggttag

SEQ ID NO: 13105 - DNA, 20 bp, synthetic construct
  misc_feature 1..20: note = Description of Artificial Sequence: Synthetic oligonucleotide
  misc_feature 1..20: note = Target: ANGPTL4; (+) strand; PAM type: NRG; PAM sequence: AAG
  source 1..20: mol_type = other DNA
gatcatgaggttaggagttc

SEQ ID NO: 13106 - DNA, 20 bp, synthetic construct
  misc_feature 1..20: note = Description of Artificial Sequence: Synthetic oligonucleotide
  misc_feature 1..20: note = Target: ANGPTL4; (+) strand; PAM type: NRG; PAM sequence: CAG
  source 1..20: mol_type = other DNA
tgaggttaggagttcaagac

SEQ ID NO: 13107 - DNA, 20 bp, synthetic construct
  misc_feature 1..20: note = Description of Artificial Sequence: Synthetic oligonucleotide
  misc_feature 1..20: note = Target: ANGPTL4; (+) strand; PAM type: NRG; PAM sequence: TGG
  source 1..20: mol_type = other DNA
ttaggagttcaagaccagcc

SEQ ID NO: 13108 - DNA, 20 bp, synthetic construct
  misc_feature 1..20: note = Description of Artificial Sequence: Synthetic oligonucleotide
  misc_feature 1..20: note = Target: ANGPTL4; (+) strand; PAM type: NRG; PAM sequence: AAG
  source 1..20: mol_type = other DNA
agttcaagaccagcctggcc

SEQ ID NO: 13109 - DNA, 20 bp, synthetic construct
  misc_feature 1..20: note = Description of Artificial Sequence: Synthetic oligonucleotide
  misc_feature 1..20: note = Target: ANGPTL4; (+) strand; PAM type: NRG; PAM sequence: TAG
  source 1..20: mol_type = other DNA
caagaccagcctggccaaga

SEQ ID NO: 13110 - DNA, 20 bp, synthetic construct
  misc_feature 1..20: note = Description of Artificial Sequence: Synthetic oligonucleotide
  misc_feature 1..20: note = Target: ANGPTL4; (+) strand; PAM type: NRG; PAM sequence: TAG
  source 1..20: mol_type = other DNA
tactaaaaatacaaaaaaat

SEQ ID NO: 13111 - DNA, 20 bp, synthetic construct
  misc_feature 1..20: note = Description of Artificial Sequence: Synthetic oligonucleotide
  misc_feature 1..20: note = Target: ANGPTL4; (+) strand; PAM type: NRG; PAM sequence: CAG
  source 1..20: mol_type = other DNA
aaaaatacaaaaaaattagc

SEQ ID NO: 13112 - DNA, 20 bp, synthetic construct
  misc_feature 1..20: note = Description of Artificial Sequence: Synthetic oligonucleotide
  misc_feature 1..20: note = Target: ANGPTL4; (+) strand; PAM type: NRG; PAM sequence: AGG
  source 1..20: mol_type = other DNA
aaaatacaaaaaaattagcc

SEQ ID NO: 13113 - DNA, 20 bp, synthetic construct
  misc_feature 1..20: note = Description of Artificial Sequence: Synthetic oligonucleotide
  misc_feature 1..20: note = Target: ANGPTL4; (+) strand; PAM type: NRG; PAM sequence: TGG
  source 1..20: mol_type = other DNA
acaaaaaaattagccaggtg

SEQ ID NO: 13114 - DNA, 20 bp, synthetic construct
  misc_feature 1..20: note = Description of Artificial Sequence: Synthetic oligonucleotide
  misc_feature 1..20: note = Target: ANGPTL4; (+) strand; PAM type: NRG; PAM sequence: TGG
  source 1..20: mol_type = other DNA
aaaaaattagccaggtgtgg

SEQ ID NO: 13115 - DNA, 20 bp, synthetic construct
  misc_feature 1..20: note = Description of Artificial Sequence: Synthetic oligonucleotide
  misc_feature 1..20: note = Target: ANGPTL4; (+) strand; PAM type: NRG; PAM sequence: TGG
  source 1..20: mol_type = other DNA
aaattagccaggtgtggtgg

SEQ ID NO: 13116 - DNA, 20 bp, synthetic construct
  misc_feature 1..20: note = Description of Artificial Sequence: Synthetic oligonucleotide
  misc_feature 1..20: note = Target: ANGPTL4; (+) strand; PAM type: NRG; PAM sequence: GGG
  source 1..20: mol_type = other DNA
aattagccaggtgtggtggt

SEQ ID NO: 13117 - DNA, 20 bp, synthetic construct
  misc_feature 1..20: note = Description of Artificial Sequence: Synthetic oligonucleotide
  misc_feature 1..20: note = Target: ANGPTL4; (+) strand; PAM type: NRG; PAM sequence: CAG
  source 1..20: mol_type = other DNA
gtggtgggcgcctgtaatcc

SEQ ID NO: 13118 - DNA, 20 bp, synthetic construct
  misc_feature 1..20: note = Description of Artificial Sequence: Synthetic oligonucleotide
  misc_feature 1..20: note = Target: ANGPTL4; (+) strand; PAM type: NRG; PAM sequence: GAG
  source 1..20: mol_type = other DNA
gcctgtaatcccagctactt

SEQ ID NO: 13119 - DNA, 20 bp, synthetic construct
  misc_feature 1..20: note = Description of Artificial Sequence: Synthetic oligonucleotide
  misc_feature 1..20: note = Target: ANGPTL4; (+) strand; PAM type: NRG; PAM sequence: GAG
  source 1..20: mol_type = other DNA
ctgtaatcccagctacttga

SEQ ID NO: 13120 - DNA, 20 bp, synthetic construct
  misc_feature 1..20: note = Description of Artificial Sequence: Synthetic oligonucleotide
  misc_feature 1..20: note = Target: ANGPTL4; (+) strand; PAM type: NRG; PAM sequence: AGG
  source 1..20: mol_type = other DNA
tgtaatcccagctacttgag

SEQ ID NO: 13121 - DNA, 20 bp, synthetic construct
  misc_feature 1..20: note = Description of Artificial Sequence: Synthetic oligonucleotide
  misc_feature 1..20: note = Target: ANGPTL4; (+) strand; PAM type: NRG; PAM sequence: AAG
  source 1..20: mol_type = other DNA
tcccagctacttgagaggct

SEQ ID NO: 13122 - DNA, 20 bp, synthetic construct
  misc_feature 1..20: note = Description of Artificial Sequence: Synthetic oligonucleotide
  misc_feature 1..20: note = Target: ANGPTL4; (+) strand; PAM type: NRG; PAM sequence: AGG
  source 1..20: mol_type = other DNA
cccagctacttgagaggcta

SEQ ID NO: 13123 - DNA, 20 bp, synthetic construct
  misc_feature 1..20: note = Description of Artificial Sequence: Synthetic oligonucleotide
  misc_feature 1..20: note = Target: ANGPTL4; (+) strand; PAM type: NRG; PAM sequence: CAG
  source 1..20: mol_type = other DNA
agctacttgagaggctaagg

SEQ ID NO: 13124 - DNA, 20 bp, synthetic construct
  misc_feature 1..20: note = Description of Artificial Sequence: Synthetic oligonucleotide
  misc_feature 1..20: note = Target: ANGPTL4; (+) strand; PAM type: NRG; PAM sequence: GAG
  source 1..20: mol_type = other DNA
ctacttgagaggctaaggca

SEQ ID NO: 13125 - DNA, 20 bp, synthetic construct
  misc_feature 1..20: note = Description of Artificial Sequence: Synthetic oligonucleotide
  misc_feature 1..20: note = Target: ANGPTL4; (+) strand; PAM type: NRG; PAM sequence: TGG
  source 1..20: mol_type = other DNA
ggctaaggcagagaattgct

SEQ ID NO: 13126 - DNA, 20 bp, synthetic construct
  misc_feature 1..20: note = Description of Artificial Sequence: Synthetic oligonucleotide
  misc_feature 1..20: note = Target: ANGPTL4; (+) strand; PAM type: NRG; PAM sequence: CGG
  source 1..20: mol_type = other DNA
ggcagagaattgcttggact

SEQ ID NO: 13127 - DNA, 20 bp, synthetic construct
  misc_feature 1..20: note = Description of Artificial Sequence: Synthetic oligonucleotide
  misc_feature 1..20: note = Target: ANGPTL4; (+) strand; PAM type: NRG; PAM sequence: GGG
  source 1..20: mol_type = other DNA
gcagagaattgcttggactc

SEQ ID NO: 13128 - DNA, 20 bp, synthetic construct
  misc_feature 1..20: note = Description of Artificial Sequence: Synthetic oligonucleotide
  misc_feature 1..20: note = Target: ANGPTL4; (+) strand; PAM type: NRG; PAM sequence: GAG
  source 1..20: mol_type = other DNA
agagaattgcttggactcgg

SEQ ID NO: 13129 - DNA, 20 bp, synthetic construct
  misc_feature 1..20: note = Description of Artificial Sequence: Synthetic oligonucleotide
  misc_feature 1..20: note = Target: ANGPTL4; (+) strand; PAM type: NRG; PAM sequence: AGG
  source 1..20: mol_type = other DNA
gagaattgcttggactcggg

SEQ ID NO: 13130 - DNA, 20 bp, synthetic construct
  misc_feature 1..20: note = Description of Artificial Sequence: Synthetic oligonucleotide
  misc_feature 1..20: note = Target: ANGPTL4; (+) strand; PAM type: NRG; PAM sequence: CAG
  source 1..20: mol_type = other DNA
aattgcttggactcgggagg

SEQ ID NO: 13131 - DNA, 20 bp, synthetic construct
  misc_feature 1..20: note = Description of Artificial Sequence: Synthetic oligonucleotide
  misc_feature 1..20: note = Target: ANGPTL4; (+) strand; PAM type: NRG; PAM sequence: GAG
  source 1..20: mol_type = other DNA
ttgcttggactcgggaggca

SEQ ID NO: 13132 - DNA, 20 bp, synthetic construct
  misc_feature 1..20: note = Description of Artificial Sequence: Synthetic oligonucleotide
  misc_feature 1..20: note = Target: ANGPTL4; (+) strand; PAM type: NRG; PAM sequence: AGG
  source 1..20: mol_type = other DNA
tgcttggactcgggaggcag

SEQ ID NO: 13133 - DNA, 20 bp, synthetic construct
  misc_feature 1..20: note = Description of Artificial Sequence: Synthetic oligonucleotide
  misc_feature 1..20: note = Target: ANGPTL4; (+) strand; PAM type: NRG; PAM sequence: GGG
  source 1..20: mol_type = other DNA
gcttggactcgggaggcaga

SEQ ID NO: 13134 - DNA, 20 bp, synthetic construct
  misc_feature 1..20: note = Description of Artificial Sequence: Synthetic oligonucleotide
  misc_feature 1..20: note = Target: ANGPTL4; (+) strand; PAM type: NRG; PAM sequence: CAG
  source 1..20: mol_type = other DNA
gactcgggaggcagagggtg

SEQ ID NO: 13135 - DNA, 20 bp, synthetic construct
  misc_feature 1..20: note = Description of Artificial Sequence: Synthetic oligonucleotide
  misc_feature 1..20: note = Target: ANGPTL4; (+) strand; PAM type: NRG; PAM sequence: GAG
  source 1..20: mol_type = other DNA
cgggaggcagagggtgcagt

SEQ ID NO: 13136 - DNA, 20 bp, synthetic construct
  misc_feature 1..20: note = Description of Artificial Sequence: Synthetic oligonucleotide
  misc_feature 1..20: note = Target: ANGPTL4; (+) strand; PAM type: NRG; PAM sequence: GAG
  source 1..20: mol_type = other DNA
ggcagagggtgcagtgagcc

SEQ ID NO: 13137 - DNA, 20 bp, synthetic construct
  misc_feature 1..20: note = Description of Artificial Sequence: Synthetic oligonucleotide
  misc_feature 1..20: note = Target: ANGPTL4; (+) strand; PAM type: NRG; PAM sequence: CAG
  source 1..20: mol_type = other DNA
gagatcatgccactgcactc

SEQ ID NO: 13138 - DNA, 20 bp, synthetic construct
  misc_feature 1..20: note = Description of Artificial Sequence: Synthetic oligonucleotide
  misc_feature 1..20: note = Target: ANGPTL4; (+) strand; PAM type: NRG; PAM sequence: TGG
  source 1..20: mol_type = other DNA
catgccactgcactccagcc

SEQ ID NO: 13139 - DNA, 20 bp, synthetic construct
  misc_feature 1..20: note = Description of Artificial Sequence: Synthetic oligonucleotide
  misc_feature 1..20: note = Target: ANGPTL4; (+) strand; PAM type: NRG; PAM sequence: GGG
  source 1..20: mol_type = other DNA
atgccactgcactccagcct

SEQ ID NO: 13140 - DNA, 20 bp, synthetic construct
  misc_feature 1..20: note = Description of Artificial Sequence: Synthetic oligonucleotide
  misc_feature 1..20: note = Target: ANGPTL4; (+) strand; PAM type: NRG; PAM sequence: CAG
  source 1..20: mol_type = other DNA
ctgcactccagcctgggcaa

SEQ ID NO: 13141 - DNA, 20 bp, synthetic construct
  misc_feature 1..20: note = Description of Artificial Sequence: Synthetic oligonucleotide
  misc_feature 1..20: note = Target: ANGPTL4; (+) strand; PAM type: NRG; PAM sequence: GAG
  source 1..20: mol_type = other DNA
gcactccagcctgggcaaca

SEQ ID NO: 13142 - DNA, 20 bp, synthetic construct
  misc_feature 1..20: note = Description of Artificial Sequence: Synthetic oligonucleotide
  misc_feature 1..20: note = Target: ANGPTL4; (+) strand; PAM type: NRG; PAM sequence: GAG
  source 1..20: mol_type = other DNA
tccagcctgggcaacagagt

SEQ ID NO: 13143 - DNA, 20 bp, synthetic construct
  misc_feature 1..20: note = Description of Artificial Sequence: Synthetic oligonucleotide
  misc_feature 1..20: note = Target: ANGPTL4; (+) strand; PAM type: NRG; PAM sequence: AAG
  source 1..20: mol_type = other DNA
ctgcctcaaaaaaaaaaaaa

SEQ ID NO: 13144 - DNA, 20 bp, synthetic construct
  misc_feature 1..20: note = Description of Artificial Sequence: Synthetic oligonucleotide
  misc_feature 1..20: note = Target: ANGPTL4; (+) strand; PAM type: NRG; PAM sequence: AAG
  source 1..20: mol_type = other DNA
aaaaaaaaaaaaaaagaatc

SEQ ID NO: 13145 - DNA, 20 bp, synthetic construct
  misc_feature 1..20: note = Description of Artificial Sequence: Synthetic oligonucleotide
  misc_feature 1..20: note = Target: ANGPTL4; (+) strand; PAM type: NRG; PAM sequence: GAG
  source 1..20: mol_type = other DNA
aaaaaaaaaaaaagaatcaa

SEQ ID NO: 13146 - DNA, 20 bp, synthetic construct
  misc_feature 1..20: note = Description of Artificial Sequence: Synthetic oligonucleotide
  misc_feature 1..20: note = Target: ANGPTL4; (+) strand; PAM type: NRG; PAM sequence: CAG
  source 1..20: mol_type = other DNA
aaaagaatcaagagaaattt

SEQ ID NO: 13147 - DNA, 20 bp, synthetic construct
  misc_feature 1..20: note = Description of Artificial Sequence: Synthetic oligonucleotide
  misc_feature 1..20: note = Target: ANGPTL4; (+) strand; PAM type: NRG; PAM sequence: GAG
  source 1..20: mol_type = other DNA
aagaatcaagagaaatttca

SEQ ID NO: 13148 - DNA, 20 bp, synthetic construct
  misc_feature 1..20: note = Description of Artificial Sequence: Synthetic oligonucleotide
  misc_feature 1..20: note = Target: ANGPTL4; (+) strand; PAM type: NRG; PAM sequence: AGG
  source 1..20: mol_type = other DNA
agaatcaagagaaatttcag

SEQ ID NO: 13149 - DNA, 20 bp, synthetic construct
  misc_feature 1..20: note = Description of Artificial Sequence: Synthetic oligonucleotide
  misc_feature 1..20: note = Target: ANGPTL4; (+) strand; PAM type: NRG; PAM sequence: GGG
  source 1..20: mol_type = other DNA
gaatcaagagaaatttcaga

SEQ ID NO: 13150 - DNA, 20 bp, synthetic construct
  misc_feature 1..20: note = Description of Artificial Sequence: Synthetic oligonucleotide
  misc_feature 1..20: note = Target: ANGPTL4; (+) strand; PAM type: NRG; PAM sequence: GAG
  source 1..20: mol_type = other DNA
atcaagagaaatttcagagg

SEQ ID NO: 13151 - DNA, 20 bp, synthetic construct
  misc_feature 1..20: note = Description of Artificial Sequence: Synthetic oligonucleotide
  misc_feature 1..20: note = Target: ANGPTL4; (+) strand; PAM type: NRG; PAM sequence: AGG
  source 1..20: mol_type = other DNA
tcaagagaaatttcagaggg

SEQ ID NO: 13152 - DNA, 20 bp, synthetic construct
  misc_feature 1..20: note = Description of Artificial Sequence: Synthetic oligonucleotide
  misc_feature 1..20: note = Target: ANGPTL4; (+) strand; PAM type: NRG; PAM sequence: GAG
  source 1..20: mol_type = other DNA
aagagaaatttcagagggag

SEQ ID NO: 13153 - DNA, 20 bp, synthetic construct
  misc_feature 1..20: note = Description of Artificial Sequence: Synthetic oligonucleotide
  misc_feature 1..20: note = Target: ANGPTL4; (+) strand; PAM type: NRG; PAM sequence: GAG
  source 1..20: mol_type = other DNA
gagaaatttcagagggagga

SEQ ID NO: 13154 - DNA, 20 bp, synthetic construct
  misc_feature 1..20: note = Description of Artificial Sequence: Synthetic oligonucleotide
  misc_feature 1..20: note = Target: ANGPTL4; (+) strand; PAM type: NRG; PAM sequence: CAG
  source 1..20: mol_type = other DNA
aatttcagagggaggagaga

SEQ ID NO: 13155 - DNA, 20 bp, synthetic construct
  misc_feature 1..20: note = Description of Artificial Sequence: Synthetic oligonucleotide
  misc_feature 1..20: note = Target: ANGPTL4; (+) strand; PAM type: NRG; PAM sequence: AAG
  source 1..20: mol_type = other DNA
agagggaggagagacagaat

SEQ ID NO: 13156 - DNA, 20 bp, synthetic construct
  misc_feature 1..20: note = Description of Artificial Sequence: Synthetic oligonucleotide
  misc_feature 1..20: note = Target: ANGPTL4; (+) strand; PAM type: NRG; PAM sequence: AGG
  source 1..20: mol_type = other DNA
gagggaggagagacagaata

SEQ ID NO: 13157 - DNA, 20 bp, synthetic construct
  misc_feature 1..20: note = Description of Artificial Sequence: Synthetic oligonucleotide
  misc_feature 1..20: note = Target: ANGPTL4; (+) strand; PAM type: NRG; PAM sequence: GAG
  source 1..20: mol_type = other DNA
agagacagaataaggcaact

SEQ ID NO: 13158 - DNA, 20 bp, synthetic construct
  misc_feature 1..20: note = Description of Artificial Sequence: Synthetic oligonucleotide
  misc_feature 1..20: note = Target: ANGPTL4; (+) strand; PAM type: NRG; PAM sequence: AGG
  source 1..20: mol_type = other DNA
gagacagaataaggcaactg

SEQ ID NO: 13159 - DNA, 20 bp, synthetic construct
  misc_feature 1..20: note = Description of Artificial Sequence: Synthetic oligonucleotide
  misc_feature 1..20: note = Target: ANGPTL4; (+) strand; PAM type: NRG; PAM sequence: TAG
  source 1..20: mol_type = other DNA
aataaggcaactgaggatga

SEQ ID NO: 13160 - DNA, 20 bp, synthetic construct
  misc_feature 1..20: note = Description of Artificial Sequence: Synthetic oligonucleotide
  misc_feature 1..20: note = Target: ANGPTL4; (+) strand; PAM type: NRG; PAM sequence: GAG
  source 1..20: mol_type = other DNA
taaggcaactgaggatgata

SEQ ID NO: 13161 - DNA, 20 bp, synthetic construct
  misc_feature 1..20: note = Description of Artificial Sequence: Synthetic oligonucleotide
  misc_feature 1..20: note = Target: ANGPTL4; (+) strand; PAM type: NRG; PAM sequence: AGG
  source 1..20: mol_type = other DNA
aaggcaactgaggatgatag

SEQ ID NO: 13162 - DNA, 20 bp, synthetic construct
  misc_feature 1..20: note = Description of Artificial Sequence: Synthetic oligonucleotide
  misc_feature 1..20: note = Target: ANGPTL4; (+) strand; PAM type: NRG; PAM sequence: GGG
  source 1..20: mol_type = other DNA
aggcaactgaggatgataga

SEQ ID NO: 13163 - DNA, 20 bp, synthetic construct
  misc_feature 1..20: note = Description of Artificial Sequence: Synthetic oligonucleotide
  misc_feature 1..20: note = Target: ANGPTL4; (+) strand; PAM type: NRG; PAM sequence: GAG
  source 1..20: mol_type = other DNA
gcaactgaggatgatagagg

SEQ ID NO: 13164 - DNA, 20 bp, synthetic construct
  misc_feature 1..20: note = Description of Artificial Sequence: Synthetic oligonucleotide
  misc_feature 1..20: note = Target: ANGPTL4; (+) strand; PAM type: NRG; PAM sequence: AGG
  source 1..20: mol_type = other DNA
caactgaggatgatagaggg

SEQ ID NO: 13165 - DNA, 20 bp, synthetic construct
  misc_feature 1..20: note = Description of Artificial Sequence: Synthetic oligonucleotide
  misc_feature 1..20: note = Target: ANGPTL4; (+) strand; PAM type: NRG; PAM sequence: GGG
  source 1..20: mol_type = other DNA
aactgaggatgatagaggga

SEQ ID NO: 13166 - DNA, 20 bp, synthetic construct
  misc_feature 1..20: note = Description of Artificial Sequence: Synthetic oligonucleotide
  misc_feature 1..20: note = Target: ANGPTL4; (+) strand; PAM type: NRG; PAM sequence: GAG
  source 1..20: mol_type = other DNA
ctgaggatgatagagggagg

SEQ ID NO: 13167 - DNA, 20 bp, synthetic construct
  misc_feature 1..20: note = Description of Artificial Sequence: Synthetic oligonucleotide
  misc_feature 1..20: note = Target: ANGPTL4; (+) strand; PAM type: NRG; PAM sequence: AGG
  source 1..20: mol_type = other DNA
tgaggatgatagagggaggg

SEQ ID NO: 13168 - DNA, 20 bp, synthetic construct
  misc_feature 1..20: note = Description of Artificial Sequence: Synthetic oligonucleotide
  misc_feature 1..20: note = Target: ANGPTL4; (+) strand; PAM type: NRG; PAM sequence: CAG
  source 1..20: mol_type = other DNA
ggatgatagagggagggagg

SEQ ID NO: 13169 - DNA, 20 bp, synthetic construct
  misc_feature 1..20: note = Description of Artificial Sequence: Synthetic oligonucleotide
  misc_feature 1..20: note = Target: ANGPTL4; (+) strand; PAM type: NRG; PAM sequence: GAG
  source 1..20: mol_type = other DNA
atgatagagggagggaggca

SEQ ID NO: 13170 - DNA, 20 bp, synthetic construct
  misc_feature 1..20: note = Description of Artificial Sequence: Synthetic oligonucleotide
  misc_feature 1..20: note = Target: ANGPTL4; (+) strand; PAM type: NRG; PAM sequence: GAG
  source 1..20: mol_type = other DNA
gatagagggagggaggcaga

SEQ ID NO: 13171 - DNA, 20 bp, synthetic construct
  misc_feature 1..20: note = Description of Artificial Sequence: Synthetic oligonucleotide
  misc_feature 1..20: note = Target: ANGPTL4; (+) strand; PAM type: NRG; PAM sequence: AGG
  source 1..20: mol_type = other DNA
atagagggagggaggcagag

SEQ ID NO: 13172 - DNA, 20 bp, synthetic construct
  misc_feature 1..20: note = Description of Artificial Sequence: Synthetic oligonucleotide
  misc_feature 1..20: note = Target: ANGPTL4; (+) strand; PAM type: NRG; PAM sequence: GAG
  source 1..20: mol_type = other DNA
agagggagggaggcagagag

SEQ ID NO: 13173 - DNA, 20 bp, synthetic construct
  misc_feature 1..20: note = Description of Artificial Sequence: Synthetic oligonucleotide
  misc_feature 1..20: note = Target: ANGPTL4; (+) strand; PAM type: NRG; PAM sequence: AAG
  source 1..20: mol_type = other DNA
gggagggaggcagagaggag

SEQ ID NO: 13174 - DNA, 20 bp, synthetic construct
  misc_feature 1..20: note = Description of Artificial Sequence: Synthetic oligonucleotide
  misc_feature 1..20: note = Target: ANGPTL4; (+) strand; PAM type: NRG; PAM sequence: GAG
  source 1..20: mol_type = other DNA
ggaggcagagaggagaagat

SEQ ID NO: 13175 - DNA, 20 bp, synthetic construct
  misc_feature 1..20: note = Description of Artificial Sequence: Synthetic oligonucleotide
  misc_feature 1..20: note = Target: ANGPTL4; (+) strand; PAM type: NRG; PAM sequence: CAG
  source 1..20: mol_type = other DNA
gcagagaggagaagatgaga

SEQ ID NO: 13176 - DNA, 20 bp, synthetic construct
  misc_feature 1..20: note = Description of Artificial Sequence: Synthetic oligonucleotide
  misc_feature 1..20: note = Target: ANGPTL4; (+) strand; PAM type: NRG; PAM sequence: AAG
  source 1..20: mol_type = other DNA
gagaggagaagatgagacag

SEQ ID NO: 13177 - DNA, 20 bp, synthetic construct
  misc_feature 1..20: note = Description of Artificial Sequence: Synthetic oligonucleotide
  misc_feature 1..20: note = Target: ANGPTL4; (+) strand; PAM type: NRG; PAM sequence: TGG
  source 1..20: mol_type = other DNA
agacagaagtccatgtcctc

SEQ ID NO: 13178 - DNA, 20 bp, synthetic construct
  misc_feature 1..20: note = Description of Artificial Sequence: Synthetic oligonucleotide
  misc_feature 1..20: note = Target: ANGPTL4; (+) strand; PAM type: NRG; PAM sequence: GGG
  source 1..20: mol_type = other DNA
gacagaagtccatgtcctct

SEQ ID NO: 13179 - DNA, 20 bp, synthetic construct
  misc_feature 1..20: note = Description of Artificial Sequence: Synthetic oligonucleotide
  misc_feature 1..20: note = Target: ANGPTL4; (+) strand; PAM type: NRG; PAM sequence: TGG
  source 1..20: mol_type = other DNA
tccatgtcctctgggtttga

SEQ ID NO: 13180 - DNA, 20 bp, synthetic construct
  misc_feature 1..20: note = Description of Artificial Sequence: Synthetic oligonucleotide
  misc_feature 1..20: note = Target: ANGPTL4; (+) strand; PAM type: NRG; PAM sequence: GGG
  source 1..20: mol_type = other DNA
ccatgtcctctgggtttgat

SEQ ID NO: 13181 - DNA, 20 bp, synthetic construct
  misc_feature 1..20: note = Description of Artificial Sequence: Synthetic oligonucleotide
  misc_feature 1..20: note = Target: ANGPTL4; (+) strand; PAM type: NRG; PAM sequence: GAG
  source 1..20: mol_type = other DNA
atgtcctctgggtttgatgg

SEQ ID NO: 13182 - DNA, 20 bp, synthetic construct
  misc_feature 1..20: note = Description of Artificial Sequence: Synthetic oligonucleotide
  misc_feature 1..20: note = Target: ANGPTL4; (+) strand; PAM type: NRG; PAM sequence: AGG
  source 1..20: mol_type = other DNA
tgtcctctgggtttgatggg

SEQ ID NO: 13183 - DNA, 20 bp, synthetic construct
  misc_feature 1..20: note = Description of Artificial Sequence: Synthetic oligonucleotide
  misc_feature 1..20: note = Target: ANGPTL4; (+) strand; PAM type: NRG; PAM sequence: GGG
  source 1..20: mol_type = other DNA
gtcctctgggtttgatggga

SEQ ID NO: 13184 - DNA, 20 bp, synthetic construct
  misc_feature 1..20: note = Description of Artificial Sequence: Synthetic oligonucleotide
  misc_feature 1..20: note = Target: ANGPTL4; (+) strand; PAM type: NRG; PAM sequence: GAG
  source 1..20: mol_type = other DNA
cctctgggtttgatgggagg

SEQ ID NO: 13185 - DNA, 20 bp, synthetic construct
  misc_feature 1..20: note = Description of Artificial Sequence: Synthetic oligonucleotide
  misc_feature 1..20: note = Target: ANGPTL4; (+) strand; PAM type: NRG; PAM sequence: AGG
  source 1..20: mol_type = other DNA
ctctgggtttgatgggaggg

SEQ ID NO: 13186 - DNA, 20 bp, synthetic construct
  misc_feature 1..20: note = Description of Artificial Sequence: Synthetic oligonucleotide
  misc_feature 1..20: note = Target: ANGPTL4; (+) strand; PAM type: NRG; PAM sequence: GGG
  source 1..20: mol_type = other DNA
tctgggtttgatgggaggga

SEQ ID NO: 13187 - DNA, 20 bp, synthetic construct
  misc_feature 1..20: note = Description of Artificial Sequence: Synthetic oligonucleotide
  misc_feature 1..20: note = Target: ANGPTL4; (+) strand; PAM type: NRG; PAM sequence: AAG
  source 1..20: mol_type = other DNA
gggtttgatgggagggaggg

SEQ ID NO: 13188 - DNA, 20 bp, synthetic construct
  misc_feature 1..20: note = Description of Artificial Sequence: Synthetic oligonucleotide
  misc_feature 1..20: note = Target: ANGPTL4; (+) strand; PAM type: NRG; PAM sequence: AGG
  source 1..20: mol_type = other DNA
ggtttgatgggagggaggga

SEQ ID NO: 13189 - DNA, 20 bp, synthetic construct
  misc_feature 1..20: note = Description of Artificial Sequence: Synthetic oligonucleotide
  misc_feature 1..20: note = Target: ANGPTL4; (+) strand; PAM type: NRG; PAM sequence: AAG
  source 1..20: mol_type = other DNA
ttgatgggagggagggaagg

SEQ ID NO: 13190 - DNA, 20 bp, synthetic construct
  misc_feature 1..20: note = Description of Artificial Sequence: Synthetic oligonucleotide
  misc_feature 1..20: note = Target: ANGPTL4; (+) strand; PAM type: NRG; PAM sequence: AGG
  source 1..20: mol_type = other DNA
tgatgggagggagggaagga

SEQ ID NO: 13191 - DNA, 20 bp, synthetic construct
  misc_feature 1..20: note = Description of Artificial Sequence: Synthetic oligonucleotide
  misc_feature 1..20: note = Target: ANGPTL4; (+) strand; PAM type: NRG; PAM sequence: TGG
  source 1..20: mol_type = other DNA
gggagggagggaaggaagga

SEQ ID NO: 13192 - DNA, 20 bp, synthetic construct
  misc_feature 1..20: note = Description of Artificial Sequence: Synthetic oligonucleotide
  misc_feature 1..20: note = Target: ANGPTL4; (+) strand; PAM type: NRG; PAM sequence: GAG
  source 1..20: mol_type = other DNA
gagggagggaaggaaggatg

SEQ ID NO: 13193 - DNA, 20 bp, synthetic construct
  misc_feature 1..20: note = Description of Artificial Sequence: Synthetic oligonucleotide
  misc_feature 1..20: note = Target: ANGPTL4; (+) strand; PAM type: NRG; PAM sequence: AAG
  source 1..20: mol_type = other DNA
ggaaggaaggatggagacac

SEQ ID NO: 13194 - DNA, 20 bp, synthetic construct
  misc_feature 1..20: note = Description of Artificial Sequence: Synthetic oligonucleotide
  misc_feature 1..20: note = Target: ANGPTL4; (+) strand; PAM type: NRG; PAM sequence: GAG
  source 1..20: mol_type = other DNA
aaggaaggatggagacacaa

SEQ ID NO: 13195 - DNA, 20 bp, synthetic construct
  misc_feature 1..20: note = Description of Artificial Sequence: Synthetic oligonucleotide
  misc_feature 1..20: note = Target: ANGPTL4; (+) strand; PAM type: NRG; PAM sequence: AGG
  source 1..20: mol_type = other DNA
aggaaggatggagacacaag

SEQ ID NO: 13196 - DNA, 20 bp, synthetic construct
  misc_feature 1..20: note = Description of Artificial Sequence: Synthetic oligonucleotide
  misc_feature 1..20: note = Target: ANGPTL4; (+) strand; PAM type: NRG; PAM sequence: GGG
  source 1..20: mol_type = other DNA
ggaaggatggagacacaaga

SEQ ID NO: 13197 - DNA, 20 bp, synthetic construct
  misc_feature 1..20: note = Description of Artificial Sequence: Synthetic oligonucleotide
  misc_feature 1..20: note = Target: ANGPTL4; (+) strand; PAM type: NRG; PAM sequence: GGG
  source 1..20: mol_type = other DNA
gaaggatggagacacaagag

SEQ ID NO: 13198 - DNA, 20 bp, synthetic construct
  misc_feature 1..20: note = Description of Artificial Sequence: Synthetic oligonucleotide
  misc_feature 1..20: note = Target: ANGPTL4; (+) strand; PAM type: NRG; PAM sequence: GGG
  source 1..20: mol_type = other DNA
aaggatggagacacaagagg

SEQ ID NO: 13199 - DNA, 20 bp, synthetic construct
  misc_feature 1..20: note = Description of Artificial Sequence: Synthetic oligonucleotide
  misc_feature 1..20: note = Target: ANGPTL4; (+) strand; PAM type: NRG; PAM sequence: GAG
  source 1..20: mol_type = other DNA
ggatggagacacaagagggg

SEQ ID NO: 13200 - DNA, 20 bp, synthetic construct
  misc_feature 1..20: note = Description of Artificial Sequence: Synthetic oligonucleotide
  misc_feature 1..20: note = Target: ANGPTL4; (+) strand; PAM type: NRG; PAM sequence: TGG
  source 1..20: mol_type = other DNA
tggagacacaagagggggag

SEQ ID NO: 13201 - DNA, 20 bp, synthetic construct
  misc_feature 1..20: note = Description of Artificial Sequence: Synthetic oligonucleotide
  misc_feature 1..20: note = Target: ANGPTL4; (+) strand; PAM type: NRG; PAM sequence: TGG
  source 1..20: mol_type = other DNA
cacaagagggggagtggata

SEQ ID NO: 13202 - DNA, 20 bp, synthetic construct
  misc_feature 1..20: note = Description of Artificial Sequence: Synthetic oligonucleotide
  misc_feature 1..20: note = Target: ANGPTL4; (+) strand; PAM type: NRG; PAM sequence: GGG
  source 1..20: mol_type = other DNA
acaagagggggagtggatat

SEQ ID NO: 13203 - DNA, 20 bp, synthetic construct
  misc_feature 1..20: note = Description of Artificial Sequence: Synthetic oligonucleotide
  misc_feature 1..20: note = Target: ANGPTL4; (+) strand; PAM type: NRG; PAM sequence: GGG
  source 1..20: mol_type = other DNA
caagagggggagtggatatg

SEQ ID NO: 13204 - DNA, 20 bp, synthetic construct
  misc_feature 1..20: note = Description of Artificial Sequence: Synthetic oligonucleotide
  misc_feature 1..20: note = Target: ANGPTL4; (+) strand; PAM type: NRG; PAM sequence: AAG
  source 1..20: mol_type = other DNA
gagggggagtggatatgggg

SEQ ID NO: 13205 - DNA, 20 bp, synthetic construct
  misc_feature 1..20: note = Description of Artificial Sequence: Synthetic oligonucleotide
  misc_feature 1..20: note = Target: ANGPTL4; (+) strand; PAM type: NRG; PAM sequence: AGG
  source 1..20: mol_type = other DNA
agggggagtggatatgggga

SEQ ID NO: 13206 - DNA, 20 bp, synthetic construct
  misc_feature 1..20: note = Description of Artificial Sequence: Synthetic oligonucleotide
  misc_feature 1..20: note = Target: ANGPTL4; (+) strand; PAM type: NRG; PAM sequence: GAG
  source 1..20: mol_type = other DNA
ggggagtggatatggggaag

SEQ ID NO: 13207 - DNA, 20 bp, synthetic construct
  misc_feature 1..20: note = Description of Artificial Sequence: Synthetic oligonucleotide
  misc_feature 1..20: note = Target: ANGPTL4; (+) strand; PAM type: NRG; PAM sequence: TGG
  source 1..20: mol_type = other DNA
gaaggagtcaaatttgttta

SEQ ID NO: 13208 - DNA, 20 bp, synthetic construct
  misc_feature 1..20: note = Description of Artificial Sequence: Synthetic oligonucleotide
  misc_feature 1..20: note = Target: ANGPTL4; (+) strand; PAM type: NRG; PAM sequence: GGG
  source 1..20: mol_type = other DNA
aaggagtcaaatttgtttat

SEQ ID NO: 13209 - DNA, 20 bp, synthetic construct
  misc_feature 1..20: note = Description of Artificial Sequence: Synthetic oligonucleotide
  misc_feature 1..20: note = Target: ANGPTL4; (+) strand; PAM type: NRG; PAM sequence: GAG
  source 1..20: mol_type = other DNA
tcaaatttgtttatgggatt

SEQ ID NO: 13210 - DNA, 20 bp, synthetic construct
  misc_feature 1..20: note = Description of Artificial Sequence: Synthetic oligonucleotide
  misc_feature 1..20: note = Target: ANGPTL4; (+) strand; PAM type: NRG; PAM sequence: GAG
  source 1..20: mol_type = other DNA
aaatttgtttatgggattga

SEQ ID NO: 13211 - DNA, 20 bp, synthetic construct
  misc_feature 1..20: note = Description of Artificial Sequence: Synthetic oligonucleotide
  misc_feature 1..20: note = Target: ANGPTL4; (+) strand; PAM type: NRG; PAM sequence: AGG
  source 1..20: mol_type = other DNA
aatttgtttatgggattgag

SEQ ID NO: 13212 - DNA, 20 bp, synthetic construct
  misc_feature 1..20: note = Description of Artificial Sequence: Synthetic oligonucleotide
  misc_feature 1..20: note = Target: ANGPTL4; (+) strand; PAM type: NRG; PAM sequence: AAG
  source 1..20: mol_type = other DNA
gtttatgggattgagaggtg

SEQ ID NO: 13213 - DNA, 20 bp, synthetic construct
  misc_feature 1..20: note = Description of Artificial Sequence: Synthetic oligonucleotide
  misc_feature 1..20: note = Target: ANGPTL4; (+) strand; PAM type: NRG; PAM sequence: CGG
  source 1..20: mol_type = other DNA
atgggattgagaggtgaagc

SEQ ID NO: 13214 - DNA, 20 bp, synthetic construct
  misc_feature 1..20: note = Description of Artificial Sequence: Synthetic oligonucleotide
  misc_feature 1..20: note = Target: ANGPTL4; (+) strand; PAM type: NRG; PAM sequence: TAG
  source 1..20: mol_type = other DNA
gattgagaggtgaagccggc

SEQ ID NO: 13215 - DNA, 20 bp, synthetic construct
  misc_feature 1..20: note = Description of Artificial Sequence: Synthetic oligonucleotide
  misc_feature 1..20: note = Target: ANGPTL4; (+) strand; PAM type: NRG; PAM sequence: AGG
  source 1..20: mol_type = other DNA
attgagaggtgaagccggct

SEQ ID NO: 13216 - DNA, 20 bp, synthetic construct
  misc_feature 1..20: note = Description of Artificial Sequence: Synthetic oligonucleotide
  misc_feature 1..20: note = Target: ANGPTL4; (+) strand; PAM type: NRG; PAM sequence: TGG
  source 1..20: mol_type = other DNA
ggtgaagccggctaggcttc

SEQ ID NO: 13217 - DNA, 20 bp, synthetic construct
  misc_feature 1..20: note = Description of Artificial Sequence: Synthetic oligonucleotide
  misc_feature 1..20: note = Target: ANGPTL4; (+) strand; PAM type: NRG; PAM sequence: GGG
  source 1..20: mol_type = other DNA
gtgaagccggctaggcttct

SEQ ID NO: 13218 - DNA, 20 bp, synthetic construct
  misc_feature 1..20: note = Description of Artificial Sequence: Synthetic oligonucleotide
  misc_feature 1..20: note = Target: ANGPTL4; (+) strand; PAM type: NRG; PAM sequence: CGG
  source 1..20: mol_type = other DNA
agccggctaggcttctgggt

SEQ ID NO: 13219 - DNA, 20 bp, synthetic construct
  misc_feature 1..20: note = Description of Artificial Sequence: Synthetic oligonucleotide
  misc_feature 1..20: note = Target: ANGPTL4; (+) strand; PAM type: NRG; PAM sequence: GGG
  source 1..20: mol_type = other DNA
gccggctaggcttctgggtc

SEQ ID NO: 13220 - DNA, 20 bp, synthetic construct
  misc_feature 1..20: note = Description of Artificial Sequence: Synthetic oligonucleotide
  misc_feature 1..20: note = Target: ANGPTL4; (+) strand; PAM type: NRG; PAM sequence: TGG
  source 1..20: mol_type = other DNA
ggctaggcttctgggtcggg

SEQ ID NO: 13221 - DNA, 20 bp, synthetic construct
  misc_feature 1..20: note = Description of Artificial Sequence: Synthetic oligonucleotide
  misc_feature 1..20: note = Target: ANGPTL4; (+) strand; PAM type: NRG; PAM sequence: GGG
  source 1..20: mol_type = other DNA
gctaggcttctgggtcgggt

SEQ ID NO: 13222 - DNA, 20 bp, synthetic construct
  misc_feature 1..20: note = Description of Artificial Sequence: Synthetic oligonucleotide
  misc_feature 1..20: note = Target: ANGPTL4; (+) strand; PAM type: NRG; PAM sequence: GGG
  source 1..20: mol_type = other DNA
ctaggcttctgggtcgggtg

SEQ ID NO: 13223 - DNA, 20 bp, synthetic construct
  misc_feature 1..20: note = Description of Artificial Sequence: Synthetic oligonucleotide
  misc_feature 1..20: note = Target: ANGPTL4; (+) strand; PAM type: NRG; PAM sequence: TAG
  source 1..20: mol_type = other DNA
gggacttgaacttttctgtc

SEQ ID NO: 13224 - DNA, 20 bp, synthetic construct
  misc_feature 1..20: note = Description of Artificial Sequence: Synthetic oligonucleotide
  misc_feature 1..20: note = Target: ANGPTL4; (+) strand; PAM type: NRG; PAM sequence: AAG
  source 1..20: mol_type = other DNA
tgaacttttctgtctagcta

SEQ ID NO: 13225 - DNA, 20 bp, synthetic construct
  misc_feature 1..20: note = Description of Artificial Sequence: Synthetic oligonucleotide
  misc_feature 1..20: note = Target: ANGPTL4; (+) strand; PAM type: NRG; PAM sequence: AGG
  source 1..20: mol_type = other DNA
gaacttttctgtctagctaa

SEQ ID NO: 13226 - DNA, 20 bp, synthetic construct
  misc_feature 1..20: note = Description of Artificial Sequence: Synthetic oligonucleotide
  misc_feature 1..20: note = Target: ANGPTL4; (+) strand; PAM type: NRG; PAM sequence: CAG
  source 1..20: mol_type = other DNA
aggattgtaaacgtaccaat

SEQ ID NO: 13227 - DNA, 20 bp, synthetic construct
  misc_feature 1..20: note = Description of Artificial Sequence: Synthetic oligonucleotide
  misc_feature 1..20: note = Target: ANGPTL4; (+) strand; PAM type: NRG; PAM sequence: TAG
  source 1..20: mol_type = other DNA
accaatcagcactctgtgtc

SEQ ID NO: 13228 - DNA, 20 bp, synthetic construct
  misc_feature 1..20: note = Description of Artificial Sequence: Synthetic oligonucleotide
  misc_feature 1..20: note = Target: ANGPTL4; (+) strand; PAM type: NRG; PAM sequence: AAG
  source 1..20: mol_type = other DNA
cagcactctgtgtctagcta

SEQ ID NO: 13229 - DNA, 20 bp, synthetic construct
  misc_feature 1..20: note = Description of Artificial Sequence: Synthetic oligonucleotide
  misc_feature 1..20: note = Target: ANGPTL4; (+) strand; PAM type: NRG; PAM sequence: AGG
  source 1..20: mol_type = other DNA
agcactctgtgtctagctaa

SEQ ID NO: 13230 - DNA, 20 bp, synthetic construct
  misc_feature 1..20: note = Description of Artificial Sequence: Synthetic oligonucleotide
  misc_feature 1..20: note = Target: ANGPTL4; (+) strand; PAM type: NRG; PAM sequence: CAG
  source 1..20: mol_type = other DNA
aggattgtaaatgcaccaat

SEQ ID NO: 13231 - DNA, 20 bp, synthetic construct
  misc_feature 1..20: note = Description of Artificial Sequence: Synthetic oligonucleotide
  misc_feature 1..20: note = Target: ANGPTL4; (+) strand; PAM type: NRG; PAM sequence: TAG
  source 1..20: mol_type = other DNA
accaatcagcactctgtgtc

SEQ ID NO: 13232 - DNA, 20 bp, synthetic construct
  misc_feature 1..20: note = Description of Artificial Sequence: Synthetic oligonucleotide
  misc_feature 1..20: note = Target: ANGPTL4; (+) strand; PAM type: NRG; PAM sequence: AAG
  source 1..20: mol_type = other DNA
cagcactctgtgtctagcta

SEQ ID NO: 13233 - DNA, 20 bp, synthetic construct
  misc_feature 1..20: note = Description of Artificial Sequence: Synthetic oligonucleotide
  misc_feature 1..20: note = Target: ANGPTL4; (+) strand; PAM type: NRG; PAM sequence: AGG
  source 1..20: mol_type = other DNA
agcactctgtgtctagctaa

SEQ ID NO: 13234 - DNA, 20 bp, synthetic construct
  misc_feature 1..20: note = Description of Artificial Sequence: Synthetic oligonucleotide
  misc_feature 1..20: note = Target: ANGPTL4; (+) strand; PAM type: NRG; PAM sequence: CAG
  source 1..20: mol_type = other DNA
aggtttgtaaatgcaccaat

SEQ ID NO: 13235 - DNA, 20 bp, synthetic construct
  misc_feature 1..20: note = Description of Artificial Sequence: Synthetic oligonucleotide
  misc_feature 1..20: note = Target: ANGPTL4; (+) strand; PAM type: NRG; PAM sequence: TAG
  source 1..20: mol_type = other DNA
accaatcagcgctctgtgtc

SEQ ID NO: 13236 - DNA, 20 bp, synthetic construct
  misc_feature 1..20: note = Description of Artificial Sequence: Synthetic oligonucleotide
  misc_feature 1..20: note = Target: ANGPTL4; (+) strand; PAM type: NRG; PAM sequence: CAG
  source 1..20: mol_type = other DNA
gcgctctgtgtctagctaat

SEQ ID NO: 13237 - DNA, 20 bp, synthetic construct
  misc_feature 1..20: note = Description of Artificial Sequence: Synthetic oligonucleotide
  misc_feature 1..20: note = Target: ANGPTL4; (+) strand; PAM type: NRG; PAM sequence: AGG
  source 1..20: mol_type = other DNA
cgctctgtgtctagctaatc

SEQ ID NO: 13238 - DNA, 20 bp, synthetic construct
  misc_feature 1..20: note = Description of Artificial Sequence: Synthetic oligonucleotide
  misc_feature 1..20: note = Target: ANGPTL4; (+) strand; PAM type: NRG; PAM sequence: TAG
  source 1..20: mol_type = other DNA
tctgtgtctagctaatcagg

SEQ ID NO: 13239 - DNA, 20 bp, synthetic construct
  misc_feature 1..20: note = Description of Artificial Sequence: Synthetic oligonucleotide
  misc_feature 1..20: note = Target: ANGPTL4; (+) strand; PAM type: NRG; PAM sequence: AGG
  source 1..20: mol_type = other DNA
ctgtgtctagctaatcaggt

SEQ ID NO: 13240 - DNA, 20 bp, synthetic construct
  misc_feature 1..20: note = Description of Artificial Sequence: Synthetic oligonucleotide
  misc_feature 1..20: note = Target: ANGPTL4; (+) strand; PAM type: NRG; PAM sequence: GGG
  source 1..20: mol_type = other DNA
tgtgtctagctaatcaggta

SEQ ID NO: 13241 - DNA, 20 bp, synthetic construct
  misc_feature 1..20: note = Description of Artificial Sequence: Synthetic oligonucleotide
  misc_feature 1..20: note = Target: ANGPTL4; (+) strand; PAM type: NRG; PAM sequence: GGG
  source 1..20: mol_type = other DNA
gtgtctagctaatcaggtag

SEQ ID NO: 13242 - DNA, 20 bp, synthetic construct
  misc_feature 1..20: note = Description of Artificial Sequence: Synthetic oligonucleotide
  misc_feature 1..20: note = Target: ANGPTL4; (+) strand; PAM type: NRG; PAM sequence: TGG
  source 1..20: mol_type = other DNA
agctaatcaggtaggggact

SEQ ID NO: 13243 - DNA, 20 bp, synthetic construct
  misc_feature 1..20: note = Description of Artificial Sequence: Synthetic oligonucleotide
  misc_feature 1..20: note = Target: ANGPTL4; (+) strand; PAM type: NRG; PAM sequence: GAG
  source 1..20: mol_type = other DNA
ctaatcaggtaggggacttg

SEQ ID NO: 13244 - DNA, 20 bp, synthetic construct
  misc_feature 1..20: note = Description of Artificial Sequence: Synthetic oligonucleotide
  misc_feature 1..20: note = Target: ANGPTL4; (-) strand; PAM type: YTN; PAM sequence: TTG
  source 1..20: mol_type = other DNA
ggtgacagagcaagactctg

SEQ ID NO: 13245 - DNA, 20 bp, synthetic construct
  misc_feature 1..20: note = Description of Artificial Sequence: Synthetic oligonucleotide
  misc_feature 1..20: note = Target: ANGPTL4; (-) strand; PAM type: YTN; PAM sequence: CTT
  source 1..20: mol_type = other DNA
gggtgacagagcaagactct

SEQ ID NO: 13246 - DNA, 20 bp, synthetic construct
  misc_feature 1..20: note = Description of Artificial Sequence: Synthetic oligonucleotide
  misc_feature 1..20: note = Target: ANGPTL4; (-) strand; PAM type: YTN; PAM sequence: CTC
  source 1..20: mol_type = other DNA
cagcttgggtgacagagcaa

SEQ ID NO: 13247 - DNA, 20 bp, synthetic construct
  misc_feature 1..20: note = Description of Artificial Sequence: Synthetic oligonucleotide
  misc_feature 1..20: note = Target: ANGPTL4; (-) strand; PAM type: YTN; PAM sequence: TTG
  source 1..20: mol_type = other DNA
cactccagcttgggtgacag

SEQ ID NO: 13248 - DNA, 20 bp, synthetic construct
  misc_feature 1..20: note = Description of Artificial Sequence: Synthetic oligonucleotide
  misc_feature 1..20: note = Target: ANGPTL4; (-) strand; PAM type: YTN; PAM sequence: CTG
  source 1..20: mol_type = other DNA
cagtaagcggagatcgtacc

SEQ ID NO: 13249 - DNA, 20 bp, synthetic construct
  misc_feature 1..20: note = Description of Artificial Sequence: Synthetic oligonucleotide
  misc_feature 1..20: note = Target: ANGPTL4; (-) strand; PAM type: YTN; PAM sequence: TTG
  source 1..20: mol_type = other DNA
aacccaggaggtggaggctg

SEQ ID NO: 13250 - DNA, 20 bp, synthetic construct
  misc_feature 1..20: note = Description of Artificial Sequence: Synthetic oligonucleotide
  misc_feature 1..20: note = Target: ANGPTL4; (-) strand; PAM type: YTN; PAM sequence: CTT
  source 1..20: mol_type = other DNA
gaacccaggaggtggaggct

SEQ ID NO: 13251 - DNA, 20 bp, synthetic construct
  misc_feature 1..20: note = Description of Artificial Sequence: Synthetic oligonucleotide
  misc_feature 1..20: note = Target: ANGPTL4; (-) strand; PAM type: YTN; PAM sequence: TTC
  source 1..20: mol_type = other DNA
gcttgaacccaggaggtgga

SEQ ID NO: 13252 - DNA, 20 bp, synthetic construct
  misc_feature 1..20: note = Description of Artificial Sequence: Synthetic oligonucleotide
  misc_feature 1..20: note = Target: ANGPTL4; (-) strand; PAM type: YTN; PAM sequence: CTG
  source 1..20: mol_type = other DNA
aggtgggagattcgcttgaa

SEQ ID NO: 13253 - DNA, 20 bp, synthetic construct
  misc_feature 1..20: note = Description of Artificial Sequence: Synthetic oligonucleotide
  misc_feature 1..20: note = Target: ANGPTL4; (-) strand; PAM type: YTN; PAM sequence: TTG
  source 1..20: mol_type = other DNA
tgaggctgaggtgggagatt

SEQ ID NO: 13254 - DNA, 20 bp, synthetic construct
  misc_feature 1..20: note = Description of Artificial Sequence: Synthetic oligonucleotide
  misc_feature 1..20: note = Target: ANGPTL4; (-) strand; PAM type: YTN; PAM sequence: TTT
  source 1..20: mol_type = other DNA
gtgaggctgaggtgggagat

SEQ ID NO: 13255 - DNA, 20 bp, synthetic construct
  misc_feature 1..20: note = Description of Artificial Sequence: Synthetic oligonucleotide
  misc_feature 1..20: note = Target: ANGPTL4; (-) strand; PAM type: YTN; PAM sequence: CTA
  source 1..20: mol_type = other DNA
tttgtgaggctgaggtggga

SEQ ID NO: 13256 - DNA, 20 bp, synthetic construct
  misc_feature 1..20: note = Description of Artificial Sequence: Synthetic oligonucleotide
  misc_feature 1..20: note = Target: ANGPTL4; (-) strand; PAM type: YTN; PAM sequence: CTC
  source 1..20: mol_type = other DNA
agctatttgtgaggctgagg

SEQ ID NO: 13257 - DNA, 20 bp, synthetic construct
  misc_feature 1..20: note = Description of Artificial Sequence: Synthetic oligonucleotide
  misc_feature 1..20: note = Target: ANGPTL4; (-) strand; PAM type: YTN; PAM sequence: TTA
  source 1..20: mol_type = other DNA
gcaggcatggtggtgtgtgg

SEQ ID NO: 13258 - DNA, 20 bp, synthetic construct
  misc_feature 1..20: note = Description of Artificial Sequence: Synthetic oligonucleotide
  misc_feature 1..20: note = Target: ANGPTL4; (-) strand; PAM type: YTN; PAM sequence: CTA
  source 1..20: mol_type = other DNA
aaaatacagaaattagcagg

SEQ ID NO: 13259 - DNA, 20 bp, synthetic construct
  misc_feature 1..20: note = Description of Artificial Sequence: Synthetic oligonucleotide
  misc_feature 1..20: note = Target: ANGPTL4; (-) strand; PAM type: YTN; PAM sequence: CTA
  source 1..20: mol_type = other DNA
ctaaaaatacagaaattagc

SEQ ID NO: 13260 - DNA, 20 bp, synthetic construct
  misc_feature 1..20: note = Description of Artificial Sequence: Synthetic oligonucleotide
  misc_feature 1..20: note = Target: ANGPTL4; (-) strand; PAM type: YTN; PAM sequence: CTC
  source 1..20: mol_type = other DNA
tactaaaaatacagaaatta

SEQ ID NO: 13261 - DNA, 20 bp, synthetic construct
  misc_feature 1..20: note = Description of Artificial Sequence: Synthetic oligonucleotide
  misc_feature 1..20: note = Target: ANGPTL4; (-) strand; PAM type: YTN; PAM sequence: CTG
  source 1..20: mol_type = other DNA
gccagcatggtgaaacccca

SEQ ID NO: 13262 - DNA, 20 bp, synthetic construct
  misc_feature 1..20: note = Description of Artificial Sequence: Synthetic oligonucleotide
  misc_feature 1..20: note = Target: ANGPTL4; (-) strand; PAM type: YTN; PAM sequence: TTC
  source 1..20: mol_type = other DNA
gagaccagcctggccagcat

SEQ ID NO: 13263 - DNA, 20 bp, synthetic construct
  misc_feature 1..20: note = Description of Artificial Sequence: Synthetic oligonucleotide
  misc_feature 1..20: note = Target: ANGPTL4; (-) strand; PAM type: YTN; PAM sequence: CTG
  source 1..20: mol_type = other DNA
ggagttcgagaccagcctgg

SEQ ID NO: 13264 - DNA, 20 bp, synthetic construct
  misc_feature 1..20: note = Description of Artificial Sequence: Synthetic oligonucleotide
  misc_feature 1..20: note = Target: ANGPTL4; (-) strand; PAM type: YTN; PAM sequence: TTG
  source 1..20: mol_type = other DNA
agtctgggagttcgagacca

SEQ ID NO: 13265 - DNA, 20 bp, synthetic construct
  misc_feature 1..20: note = Description of Artificial Sequence: Synthetic oligonucleotide
  misc_feature 1..20: note = Target: ANGPTL4; (-) strand; PAM type: YTN; PAM sequence: CTT
  source 1..20: mol_type = other DNA
gagtctgggagttcgagacc

SEQ ID NO: 13266 - DNA, 20 bp, synthetic construct
  misc_feature 1..20: note = Description of Artificial Sequence: Synthetic oligonucleotide
  misc_feature 1..20: note = Target: ANGPTL4; (-) strand; PAM type: YTN; PAM sequence: CTG
  source 1..20: mol_type = other DNA
aggtgggtggatcacttgag

SEQ ID NO: 13267 - DNA, 20 bp, synthetic construct
  misc_feature 1..20: note = Description of Artificial Sequence: Synthetic oligonucleotide
  misc_feature 1..20: note = Target: ANGPTL4; (-) strand; PAM type: YTN; PAM sequence: TTG
  source 1..20: mol_type = other DNA
ggaggctgaggtgggtggat

SEQ ID NO: 13268 - DNA, 20 bp, synthetic construct
  misc_feature 1..20: note = Description of Artificial Sequence: Synthetic oligonucleotide
  misc_feature 1..20: note = Target: ANGPTL4; (-) strand; PAM type: YTN; PAM sequence: TTT
  source 1..20: mol_type = other DNA
gggaggctgaggtgggtgga

SEQ ID NO: 13269 - DNA, 20 bp, synthetic construct
  misc_feature 1..20: note = Description of Artificial Sequence: Synthetic oligonucleotide
  misc_feature 1..20: note = Target: ANGPTL4; (-) strand; PAM type: YTN; PAM sequence: CTT
  source 1..20: mol_type = other DNA
tgggaggctgaggtgggtgg

SEQ ID NO: 13270 - DNA, 20 bp, synthetic construct
  misc_feature 1..20: note = Description of Artificial Sequence: Synthetic oligonucleotide
  misc_feature 1..20: note = Target: ANGPTL4; (-) strand; PAM type: YTN; PAM sequence: CTA
  source 1..20: mol_type = other DNA
gcactttgggaggctgaggt

SEQ ID NO: 13271 - DNA, 20 bp, synthetic construct
  misc_feature 1..20: note = Description of Artificial Sequence: Synthetic oligonucleotide
  misc_feature 1..20: note = Target: ANGPTL4; (-) strand; PAM type: YTN; PAM sequence: CTG
  source 1..20: mol_type = other DNA
taatcctagcactttgggag

SEQ ID NO: 13272 - DNA, 20 bp, synthetic construct
  misc_feature 1..20: note = Description of Artificial Sequence: Synthetic oligonucleotide
  misc_feature 1..20: note = Target: ANGPTL4; (-) strand; PAM type: YTN; PAM sequence: CTC
  source 1..20: mol_type = other DNA
acacctgtaatcctagcact

SEQ ID NO: 13273 - DNA, 20 bp, synthetic construct
  misc_feature 1..20: note = Description of Artificial Sequence: Synthetic oligonucleotide
  misc_feature 1..20: note = Target: ANGPTL4; (-) strand; PAM type: YTN; PAM sequence: CTG
  source 1..20: mol_type = other DNA
gggcccggcatggtggctca

SEQ ID NO: 13274 - DNA, 20 bp, synthetic construct
  misc_feature 1..20: note = Description of Artificial Sequence: Synthetic oligonucleotide
  misc_feature 1..20: note = Target: ANGPTL4; (-) strand; PAM type: YTN; PAM sequence: TTA
  source 1..20: mol_type = other DNA
gctggggcccggcatggtgg

SEQ ID NO: 13275 - DNA, 20 bp, synthetic construct
  misc_feature 1..20: note = Description of Artificial Sequence: Synthetic oligonucleotide
  misc_feature 1..20: note = Target: ANGPTL4; (-) strand; PAM type: YTN; PAM sequence: CTC
  source 1..20: mol_type = other DNA
aaaaaaaaaaaaaaattagc

SEQ ID NO: 13276 - DNA, 20 bp, synthetic construct
  misc_feature 1..20: note = Description of Artificial Sequence: Synthetic oligonucleotide
  misc_feature 1..20: note = Target: ANGPTL4; (-) strand; PAM type: YTN; PAM sequence: CTG
  source 1..20: mol_type = other DNA
tctcaaaaaaaaaaaaaaat

SEQ ID NO: 13277 - DNA, 20 bp, synthetic construct
  misc_feature 1..20: note = Description of Artificial Sequence: Synthetic oligonucleotide
  misc_feature 1..20: note = Target: ANGPTL4; (-) strand; PAM type: YTN; PAM sequence: CTC
  source 1..20: mol_type = other DNA
tgtctcaaaaaaaaaaaaaa

SEQ ID NO: 13278 - DNA, 20 bp, synthetic construct
  misc_feature 1..20: note = Description of Artificial Sequence: Synthetic oligonucleotide
  misc_feature 1..20: note = Target: ANGPTL4; (-) strand; PAM type: YTN; PAM sequence: CTG
  source 1..20: mol_type = other DNA
ggcaacagggcgagactctg

SEQ ID NO: 13279 - DNA, 20 bp, synthetic construct
  misc_feature 1..20: note = Description of Artificial Sequence: Synthetic oligonucleotide
  misc_feature 1..20: note = Target: ANGPTL4; (-) strand; PAM type: YTN; PAM sequence: CTC
  source 1..20: mol_type = other DNA
cagcctgggcaacagggcga

SEQ ID NO: 13280 - DNA, 20 bp, synthetic construct
  misc_feature 1..20: note = Description of Artificial Sequence: Synthetic oligonucleotide
  misc_feature 1..20: note = Target: ANGPTL4; (-) strand; PAM type: YTN; PAM sequence: CTG
  source 1..20: mol_type = other DNA
cactccagcctgggcaacag

SEQ ID NO: 13281 - DNA, 20 bp, synthetic construct
  misc_feature 1..20: note = Description of Artificial Sequence: Synthetic oligonucleotide
  misc_feature 1..20: note = Target: ANGPTL4; (-) strand; PAM type: YTN; PAM sequence: TTG
  source 1..20: mol_type = other DNA
cgccactgcactccagcctg

SEQ ID NO: 13282 - DNA, 20 bp, synthetic construct
  misc_feature 1..20: note = Description of Artificial Sequence: Synthetic oligonucleotide
  misc_feature 1..20: note = Target: ANGPTL4; (-) strand; PAM type: YTN; PAM sequence: CTG
  source 1..20: mol_type = other DNA
gaacccgggaggcagagggt

SEQ ID NO: 13283 - DNA, 20 bp, synthetic construct
  misc_feature 1..20: note = Description of Artificial Sequence: Synthetic oligonucleotide
  misc_feature 1..20: note = Target: ANGPTL4; (-) strand; PAM type: YTN; PAM sequence: CTG
  source 1..20: mol_type = other DNA
gggcaggagaatcgctggaa

SEQ ID NO: 13284 - DNA, 20 bp, synthetic construct
  misc_feature 1..20: note = Description of Artificial Sequence: Synthetic oligonucleotide
  misc_feature 1..20: note = Target: ANGPTL4; (-) strand; PAM type: YTN; PAM sequence: CTC
  source 1..20: mol_type = other DNA
gggaggctggggcaggagaa

SEQ ID NO: 13285 - DNA, 20 bp, synthetic construct
  misc_feature 1..20: note = Description of Artificial Sequence: Synthetic oligonucleotide
  misc_feature 1..20: note = Target: ANGPTL4; (-) strand; PAM type: YTN; PAM sequence: TTA
  source 1..20: mol_type = other DNA
ctcgggaggctggggcagga

SEQ ID NO: 13286 - DNA, 20 bp, synthetic construct
  misc_feature 1..20: note = Description of Artificial Sequence: Synthetic oligonucleotide
  misc_feature 1..20: note = Target: ANGPTL4; (-) strand; PAM type: YTN; PAM sequence: CTG
  source 1..20: mol_type = other DNA
taatcccagttactcgggag

SEQ ID NO: 13287 - DNA, 20 bp, synthetic construct
  misc_feature 1..20: note = Description of Artificial Sequence: Synthetic oligonucleotide
  misc_feature 1..20: note = Target: ANGPTL4; (-) strand; PAM type: YTN; PAM sequence: TTA
  source 1..20: mol_type = other DNA
gccaggcgtggaggcgcgcg

SEQ ID NO: 13288 - DNA, 20 bp, synthetic construct
  misc_feature 1..20: note = Description of Artificial Sequence: Synthetic oligonucleotide
  misc_feature 1..20: note = Target: ANGPTL4; (-) strand; PAM type: YTN; PAM sequence: CTA
  source 1..20: mol_type = other DNA
aaaatgtaaaaattagccag

SEQ ID NO: 13289 - DNA, 20 bp, synthetic construct
  misc_feature 1..20: note = Description of Artificial Sequence: Synthetic oligonucleotide
  misc_feature 1..20: note = Target: ANGPTL4; (-) strand; PAM type: YTN; PAM sequence: CTA
  source 1..20: mol_type = other DNA
ctaaaaatgtaaaaattagc

SEQ ID NO: 13290 - DNA, 20 bp, synthetic construct
  misc_feature 1..20: note = Description of Artificial Sequence: Synthetic oligonucleotide
  misc_feature 1..20: note = Target: ANGPTL4; (-) strand; PAM type: YTN; PAM sequence: CTC
  source 1..20: mol_type = other DNA
tactaaaaatgtaaaaatta

SEQ ID NO: 13291 - DNA, 20 bp, synthetic construct
  misc_feature 1..20: note = Description of Artificial Sequence: Synthetic oligonucleotide
  misc_feature 1..20: note = Target: ANGPTL4; (-) strand; PAM type: YTN; PAM sequence: CTG
  source 1..20: mol_type = other DNA
accaacatggtgaaacccgg

SEQ ID NO: 13292 - DNA, 20 bp, synthetic construct
  misc_feature 1..20: note = Description of Artificial Sequence: Synthetic oligonucleotide
  misc_feature 1..20: note = Target: ANGPTL4; (-) strand; PAM type: YTN; PAM sequence: TTC
  source 1..20: mol_type = other DNA
gagaccagcctgaccaacat

SEQ ID NO: 13293 - DNA, 20 bp, synthetic construct
  misc_feature 1..20: note = Description of Artificial Sequence: Synthetic oligonucleotide
  misc_feature 1..20: note = Target: ANGPTL4; (-) strand; PAM type: YTN; PAM sequence: TTG
  source 1..20: mol_type = other DNA
ggagtccaaggtgggcagat

SEQ ID NO: 13294 - DNA, 20 bp, synthetic construct
  misc_feature 1..20: note = Description of Artificial Sequence: Synthetic oligonucleotide
  misc_feature 1..20: note = Target: ANGPTL4; (-) strand; PAM type: YTN; PAM sequence: TTT
  source 1..20: mol_type = other DNA
gggagtccaaggtgggcaga

SEQ ID NO: 13295 - DNA, 20 bp, synthetic construct
  misc_feature 1..20: note = Description of Artificial Sequence: Synthetic oligonucleotide
  misc_feature 1..20: note = Target: ANGPTL4; (-) strand; PAM type: YTN; PAM sequence: CTT
  source 1..20: mol_type = other DNA
tgggagtccaaggtgggcag

SEQ ID NO: 13296 - DNA, 20 bp, synthetic construct
  misc_feature 1..20: note = Description of Artificial Sequence: Synthetic oligonucleotide
  misc_feature 1..20: note = Target: ANGPTL4; (-) strand; PAM type: YTN; PAM sequence: CTG
  source 1..20: mol_type = other DNA
taataccagcactttgggag

SEQ ID NO: 13297 - DNA, 20 bp, synthetic construct
  misc_feature 1..20: note = Description of Artificial Sequence: Synthetic oligonucleotide
  misc_feature 1..20: note = Target: ANGPTL4; (-) strand; PAM type: YTN; PAM sequence: CTC
  source 1..20: mol_type = other DNA
atgcctgtaataccagcact

SEQ ID NO: 13298 - DNA, 20 bp, synthetic construct
  misc_feature 1..20: note = Description of Artificial Sequence: Synthetic oligonucleotide
  misc_feature 1..20: note = Target: ANGPTL4; (-) strand; PAM type: YTN; PAM sequence: CTG
  source 1..20: mol_type = other DNA
ggcacggtggctcatgcctg

SEQ ID NO: 13299 - DNA, 20 bp, synthetic construct
  misc_feature 1..20: note = Description of Artificial Sequence: Synthetic oligonucleotide
  misc_feature 1..20: note = Target: ANGPTL4; (-) strand; PAM type: YTN; PAM sequence: CTG
  source 1..20: mol_type = other DNA
gggccaggctgggcacggtg

SEQ ID NO: 13300 - DNA, 20 bp, synthetic construct
  misc_feature 1..20: note = Description of Artificial Sequence: Synthetic oligonucleotide
  misc_feature 1..20: note = Target: ANGPTL4; (-) strand; PAM type: YTN; PAM sequence: TTA
  source 1..20: mol_type = other DNA
gctggggccaggctgggcac

SEQ ID NO: 13301 - DNA, 20 bp, synthetic construct
  misc_feature 1..20: note = Description of Artificial Sequence: Synthetic oligonucleotide
  misc_feature 1..20: note = Target: ANGPTL4; (-) strand; PAM type: YTN; PAM sequence: TTA
  source 1..20: mol_type = other DNA
aaaaattagctggggccagg

SEQ ID NO: 13302 - DNA, 20 bp, synthetic construct
  misc_feature 1..20: note = Description of Artificial Sequence: Synthetic oligonucleotide
  misc_feature 1..20: note = Target: ANGPTL4; (-) strand; PAM type: YTN; PAM sequence: TTT
  source 1..20: mol_type = other DNA
aaaaaattagctggggccag

SEQ ID NO: 13303 - DNA, 20 bp, synthetic construct
  misc_feature 1..20: note = Description of Artificial Sequence: Synthetic oligonucleotide
  misc_feature 1..20: note = Target: ANGPTL4; (-) strand; PAM type: YTN; PAM sequence: CTG
  source 1..20: mol_type = other DNA
tacaaaaaatttaaaaaatt

SEQ ID NO: 13304 - DNA, 20 bp, synthetic construct
  misc_feature 1..20: note = Description of Artificial Sequence: Synthetic oligonucleotide
  misc_feature 1..20: note = Target: ANGPTL4; (-) strand; PAM type: YTN; PAM sequence: CTG
  source 1..20: mol_type = other DNA
tctgtacaaaaaatttaaaa

SEQ ID NO: 13305 - DNA, 20 bp, synthetic construct
  misc_feature 1..20: note = Description of Artificial Sequence: Synthetic oligonucleotide
  misc_feature 1..20: note = Target: ANGPTL4; (-) strand; PAM type: YTN; PAM sequence: TTG
  source 1..20: mol_type = other DNA
ggtaacatggcaagaccctg

SEQ ID NO: 13306 - DNA, 20 bp, synthetic construct
  misc_feature 1..20: note = Description of Artificial Sequence: Synthetic oligonucleotide
  misc_feature 1..20: note = Target: ANGPTL4; (-) strand; PAM type: YTN; PAM sequence: TTC
  source 1..20: mol_type = other DNA
aagattgggtaacatggcaa

SEQ ID NO: 13307 - DNA, 20 bp, synthetic construct
  misc_feature 1..20: note = Description of Artificial Sequence: Synthetic oligonucleotide
  misc_feature 1..20: note = Target: ANGPTL4; (-) strand; PAM type: YTN; PAM sequence: TTG
  source 1..20: mol_type = other DNA
agcccaggagttcaagattg

SEQ ID NO: 13308 - DNA, 20 bp, synthetic construct
  misc_feature 1..20: note = Description of Artificial Sequence: Synthetic oligonucleotide
  misc_feature 1..20: note = Target: ANGPTL4; (-) strand; PAM type: YTN; PAM sequence: CTT
  source 1..20: mol_type = other DNA
gagcccaggagttcaagatt

SEQ ID NO: 13309 - DNA, 20 bp, synthetic construct
  misc_feature 1..20: note = Description of Artificial Sequence: Synthetic oligonucleotide
  misc_feature 1..20: note = Target: ANGPTL4; (-) strand; PAM type: YTN; PAM sequence: CTG
  source 1..20: mol_type = other DNA
cttgagcccaggagttcaag

SEQ ID NO: 13310 - DNA, 20 bp, synthetic construct
  misc_feature 1..20: note = Description of Artificial Sequence: Synthetic oligonucleotide
  misc_feature 1..20: note = Target: ANGPTL4; (-) strand; PAM type: YTN; PAM sequence: TTG
  source 1..20: mol_type = other DNA
ggaggccaaggtgggaggac

SEQ ID NO: 13311 - DNA, 20 bp, synthetic construct
  misc_feature 1..20: note = Description of Artificial Sequence: Synthetic oligonucleotide
  misc_feature 1..20: note = Target: ANGPTL4; (-) strand; PAM type: YTN; PAM sequence: TTT
  source 1..20: mol_type = other DNA
gggaggccaaggtgggagga

SEQ ID NO: 13312 - DNA, 20 bp, synthetic construct
  misc_feature 1..20: note = Description of Artificial Sequence: Synthetic oligonucleotide
  misc_feature 1..20: note = Target: ANGPTL4; (-) strand; PAM type: YTN; PAM sequence: CTT
  source 1..20: mol_type = other DNA
tgggaggccaaggtgggagg

SEQ ID NO: 13313 - DNA, 20 bp, synthetic construct
  misc_feature 1..20: note = Description of Artificial Sequence: Synthetic oligonucleotide
  misc_feature 1..20: note = Target: ANGPTL4; (-) strand; PAM type: YTN; PAM sequence: TTG
  source 1..20: mol_type = other DNA
taatcccagtactttgggag

SEQ ID NO: 13314 - DNA, 20 bp, synthetic construct
  misc_feature 1..20: note = Description of Artificial Sequence: Synthetic oligonucleotide
  misc_feature 1..20: note = Target: ANGPTL4; (-) strand; PAM type: YTN; PAM sequence: CTT
  source 1..20: mol_type = other DNA
gtaatcccagtactttggga

SEQ ID NO: 13315 - DNA, 20 bp, synthetic construct
  misc_feature 1..20: note = Description of Artificial Sequence: Synthetic oligonucleotide
  misc_feature 1..20: note = Target: ANGPTL4; (-) strand; PAM type: YTN; PAM sequence: CTC
  source 1..20: mol_type = other DNA
atgcttgtaatcccagtact

SEQ ID NO: 13316 - DNA, 20 bp, synthetic construct
  misc_feature 1..20: note = Description of Artificial Sequence: Synthetic oligonucleotide
  misc_feature 1..20: note = Target: ANGPTL4; (-) strand; PAM type: YTN; PAM sequence: CTA
  source 1..20: mol_type = other DNA
ggcaaggtggctcatgcttg

SEQ ID NO: 13317 - DNA, 20 bp, synthetic construct
  misc_feature 1..20: note = Description of Artificial Sequence: Synthetic oligonucleotide
  misc_feature 1..20: note = Target: ANGPTL4; (-) strand; PAM type: YTN; PAM sequence: TTA
  source 1..20: mol_type = other DNA
agctaggcaaggtggctcat

SEQ ID NO: 13318 - DNA, 20 bp, synthetic construct
  misc_feature 1..20: note = Description of Artificial Sequence: Synthetic oligonucleotide
  misc_feature 1..20: note = Target: ANGPTL4; (-) strand; PAM type: YTN; PAM sequence: CTA
  source 1..20: mol_type = other DNA
caaatgtaaatgccattaag

SEQ ID NO: 13319 - DNA, 20 bp, synthetic construct
  misc_feature 1..20: note = Description of Artificial Sequence: Synthetic oligonucleotide
  misc_feature 1..20: note = Target: ANGPTL4; (-) strand; PAM type: YTN; PAM sequence: TTC
  source 1..20: mol_type = other DNA
actacaaatgtaaatgccat

SEQ ID NO: 13320 - DNA, 20 bp, synthetic construct
  misc_feature 1..20: note = Description of Artificial Sequence: Synthetic oligonucleotide
  misc_feature 1..20: note = Target: ANGPTL4; (-) strand; PAM type: YTN; PAM sequence: TTT
  source 1..20: mol_type = other DNA
cactacaaatgtaaatgcca

SEQ ID NO: 13321 - DNA, 20 bp, synthetic construct
  misc_feature 1..20: note = Description of Artificial Sequence: Synthetic oligonucleotide
  misc_feature 1..20: note = Target: ANGPTL4; (-) strand; PAM type: YTN; PAM sequence: TTA
  source 1..20: mol_type = other DNA
tgtgtatttcactacaaatg

SEQ ID NO: 13322 - DNA, 20 bp, synthetic construct
  misc_feature 1..20: note = Description of Artificial Sequence: Synthetic oligonucleotide
  misc_feature 1..20: note = Target: ANGPTL4; (-) strand; PAM type: YTN; PAM sequence: CTG
  source 1..20: mol_type = other DNA
ttatgtgtatttcactacaa

SEQ ID NO: 13323 - DNA, 20 bp, synthetic construct
  misc_feature 1..20: note = Description of Artificial Sequence: Synthetic oligonucleotide
  misc_feature 1..20: note = Target: ANGPTL4; (-) strand; PAM type: YTN; PAM sequence: CTG
  source 1..20: mol_type = other DNA
cgcccagcctgttatgtgta

SEQ ID NO: 13324 - DNA, 20 bp, synthetic construct
  misc_feature 1..20: note = Description of Artificial Sequence: Synthetic oligonucleotide
  misc_feature 1..20: note = Target: ANGPTL4; (-) strand; PAM type: YTN; PAM sequence: TTA
  source 1..20: mol_type = other DNA
caggtatgagccactgcgcc

SEQ ID NO: 13325 - DNA, 20 bp, synthetic construct
  misc_feature 1..20: note = Description of Artificial Sequence: Synthetic oligonucleotide
  misc_feature 1..20: note = Target: ANGPTL4; (-) strand; PAM type: YTN; PAM sequence: CTG
  source 1..20: mol_type = other DNA
ggattacaggtatgagccac

SEQ ID NO: 13326 - DNA, 20 bp, synthetic construct
  misc_feature 1..20: note = Description of Artificial Sequence: Synthetic oligonucleotide
  misc_feature 1..20: note = Target: ANGPTL4; (-) strand; PAM type: YTN; PAM sequence: CTC
  source 1..20: mol_type = other DNA
ccaaagtgctgggattacag

SEQ ID NO: 13327 - DNA, 20 bp, synthetic construct
  misc_feature 1..20: note = Description of Artificial Sequence: Synthetic oligonucleotide
  misc_feature 1..20: note = Target: ANGPTL4; (-) strand; PAM type: YTN; PAM sequence: CTC
  source 1..20: mol_type = other DNA
ggcctcccaaagtgctggga

SEQ ID NO: 13328 - DNA, 20 bp, synthetic construct
  misc_feature 1..20: note = Description of Artificial Sequence: Synthetic oligonucleotide
  misc_feature 1..20: note = Target: ANGPTL4; (-) strand; PAM type: YTN; PAM sequence: CTA
  source 1..20: mol_type = other DNA
cctcggcctcccaaagtgct

SEQ ID NO: 13329 - DNA, 20 bp, synthetic construct
  misc_feature 1..20: note = Description of Artificial Sequence: Synthetic oligonucleotide
  misc_feature 1..20: note = Target: ANGPTL4; (-) strand; PAM type: YTN; PAM sequence: CTC
  source 1..20: mol_type = other DNA
aggtgatccgcctacctcgg

SEQ ID NO: 13330 - DNA, 20 bp, synthetic construct
  misc_feature 1..20: note = Description of Artificial Sequence: Synthetic oligonucleotide
  misc_feature 1..20: note = Target: ANGPTL4; (-) strand; PAM type: YTN; PAM sequence: CTG
  source 1..20: mol_type = other DNA
acctcaggtgatccgcctac

SEQ ID NO: 13331 - DNA, 20 bp, synthetic construct
  misc_feature 1..20: note = Description of Artificial Sequence: Synthetic oligonucleotide
  misc_feature 1..20: note = Target: ANGPTL4; (-) strand; PAM type: YTN; PAM sequence: CTC
  source 1..20: mol_type = other DNA
ctgacctcaggtgatccgcc

SEQ ID NO: 13332 - DNA, 20 bp, synthetic construct
  misc_feature 1..20: note = Description of Artificial Sequence: Synthetic oligonucleotide
  misc_feature 1..20: note = Target: ANGPTL4; (-) strand; PAM type: YTN; PAM sequence: CTA
  source 1..20: mol_type = other DNA
actcctgacctcaggtgatc

SEQ ID NO: 13333 - DNA, 20 bp, synthetic construct
  misc_feature 1..20: note = Description of Artificial Sequence: Synthetic oligonucleotide
  misc_feature 1..20: note = Target: ANGPTL4; (-) strand; PAM type: YTN; PAM sequence: CTC
  source 1..20: mol_type = other DNA
taactcctgacctcaggtga

SEQ ID NO: 13334 - DNA, 20 bp, synthetic construct
  misc_feature 1..20: note = Description of Artificial Sequence: Synthetic oligonucleotide
  misc_feature 1..20: note = Target: ANGPTL4; (-) strand; PAM type: YTN; PAM sequence: CTG
  source 1..20: mol_type = other DNA
gtctctaactcctgacctca

SEQ ID NO: 13335 - DNA, 20 bp, synthetic construct
  misc_feature 1..20: note = Description of Artificial Sequence: Synthetic oligonucleotide
  misc_feature 1..20: note = Target: ANGPTL4; (-) strand; PAM type: YTN; PAM sequence: TTC
  source 1..20: mol_type = other DNA
gccatgtccaggctggtctc

SEQ ID NO: 13336 - DNA, 20 bp, synthetic construct
  misc_feature 1..20: note = Description of Artificial Sequence: Synthetic oligonucleotide
  misc_feature 1..20: note = Target: ANGPTL4; (-) strand; PAM type: YTN; PAM sequence: TTT
  source 1..20: mol_type = other DNA
cgccatgtccaggctggtct

SEQ ID NO: 13337 - DNA, 20 bp, synthetic construct
  misc_feature 1..20: note = Description of Artificial Sequence: Synthetic oligonucleotide
  misc_feature 1..20: note = Target: ANGPTL4; (-) strand; PAM type: YTN; PAM sequence: TTA
  source 1..20: mol_type = other DNA
gtagagacggggtttcgcca

SEQ ID NO: 13338 - DNA, 20 bp, synthetic construct
  misc_feature 1..20: note = Description of Artificial Sequence: Synthetic oligonucleotide
  misc_feature 1..20: note = Target: ANGPTL4; (-) strand; PAM type: YTN; PAM sequence: TTT
  source 1..20: mol_type = other DNA
agtagagacggggtttcgcc

SEQ ID NO: 13339 - DNA, 20 bp, synthetic construct
  misc_feature 1..20: note = Description of Artificial Sequence: Synthetic oligonucleotide
  misc_feature 1..20: note = Target: ANGPTL4; (-) strand; PAM type: YTN; PAM sequence: TTT
  source 1..20: mol_type = other DNA
tagtagagacggggtttcgc

SEQ ID NO: 13340 - DNA, 20 bp, synthetic construct
  misc_feature 1..20: note = Description of Artificial Sequence: Synthetic oligonucleotide
  misc_feature 1..20: note = Target: ANGPTL4; (-) strand; PAM type: YTN; PAM sequence: TTG
  source 1..20: mol_type = other DNA
tattttagtagagacggggt

SEQ ID NO: 13341 - DNA, 20 bp, synthetic construct
  misc_feature 1..20: note = Description of Artificial Sequence: Synthetic oligonucleotide
  misc_feature 1..20: note = Target: ANGPTL4; (-) strand; PAM type: YTN; PAM sequence: TTT
  source 1..20: mol_type = other DNA
gtattttagtagagacgggg

SEQ ID NO: 13342 - DNA, 20 bp, synthetic construct
  misc_feature 1..20: note = Description of Artificial Sequence: Synthetic oligonucleotide
  misc_feature 1..20: note = Target: ANGPTL4; (-) strand; PAM type: YTN; PAM sequence: TTT
  source 1..20: mol_type = other DNA
tgtattttagtagagacggg

SEQ ID NO: 13343 - DNA, 20 bp, synthetic construct
  misc_feature 1..20: note = Description of Artificial Sequence: Synthetic oligonucleotide
  misc_feature 1..20: note = Target: ANGPTL4; (-) strand; PAM type: YTN; PAM sequence: TTT
  source 1..20: mol_type = other DNA
ttgtattttagtagagacgg

SEQ ID NO: 13344 - DNA, 20 bp, synthetic construct
  misc_feature 1..20: note = Description of Artificial Sequence: Synthetic oligonucleotide
  misc_feature 1..20: note = Target: ANGPTL4; (-) strand; PAM type: YTN; PAM sequence: CTA
  source 1..20: mol_type = other DNA
atttttgtattttagtagag

SEQ ID NO: 13345 - DNA, 20 bp, synthetic construct
  misc_feature 1..20: note = Description of Artificial Sequence: Synthetic oligonucleotide
  misc_feature 1..20: note = Target: ANGPTL4; (-) strand; PAM type: YTN; PAM sequence: CTG
  source 1..20: mol_type = other DNA
gctaatttttgtattttagt

SEQ ID NO: 13346 - DNA, 20 bp, synthetic construct
  misc_feature 1..20: note = Description of Artificial Sequence: Synthetic oligonucleotide
  misc_feature 1..20: note = Target: ANGPTL4; (-) strand; PAM type: YTN; PAM sequence: TTA
  source 1..20: mol_type = other DNA
caggtgcccaccaccacgcc

SEQ ID NO: 13347 - DNA, 20 bp, synthetic construct
  misc_feature 1..20: note = Description of Artificial Sequence: Synthetic oligonucleotide
  misc_feature 1..20: note = Target: ANGPTL4; (-) strand; PAM type: YTN; PAM sequence: CTG
  source 1..20: mol_type = other DNA
ggattacaggtgcccaccac

SEQ ID NO: 13348 - DNA, 20 bp, synthetic construct
  misc_feature 1..20: note = Description of Artificial Sequence: Synthetic oligonucleotide
  misc_feature 1..20: note = Target: ANGPTL4; (-) strand; PAM type: YTN; PAM sequence: CTC
  source 1..20: mol_type = other DNA
ccgagtagctgggattacag

SEQ ID NO: 13349 - DNA, 20 bp, synthetic construct
  misc_feature 1..20: note = Description of Artificial Sequence: Synthetic oligonucleotide
  misc_feature 1..20: note = Target: ANGPTL4; (-) strand; PAM type: YTN; PAM sequence: CTC
  source 1..20: mol_type = other DNA
agcctcccgagtagctggga

SEQ ID NO: 13350 - DNA, 20 bp, synthetic construct
  misc_feature 1..20: note = Description of Artificial Sequence: Synthetic oligonucleotide
  misc_feature 1..20: note = Target: ANGPTL4; (-) strand; PAM type: YTN; PAM sequence: CTG
  source 1..20: mol_type = other DNA
cctcagcctcccgagtagct

SEQ ID NO: 13351 - DNA, 20 bp, synthetic construct
  misc_feature 1..20: note = Description of Artificial Sequence: Synthetic oligonucleotide
  misc_feature 1..20: note = Target: ANGPTL4; (-) strand; PAM type: YTN; PAM sequence: CTC
  source 1..20: mol_type = other DNA
ctgcctcagcctcccgagta

SEQ ID NO: 13352 - DNA, 20 bp, synthetic construct
  misc_feature 1..20: note = Description of Artificial Sequence: Synthetic oligonucleotide
  misc_feature 1..20: note = Target: ANGPTL4; (-) strand; PAM type: YTN; PAM sequence: TTC
  source 1..20: mol_type = other DNA
tcctgcctcagcctcccgag

SEQ ID NO: 13353 - DNA, 20 bp, synthetic construct
  misc_feature 1..20: note = Description of Artificial Sequence: Synthetic oligonucleotide
  misc_feature 1..20: note = Target: ANGPTL4; (-) strand; PAM type: YTN; PAM sequence: TTC
  source 1..20: mol_type = other DNA
aaatgattctcctgcctcag

SEQ ID NO: 13354 - DNA, 20 bp, synthetic construct
  misc_feature 1..20: note = Description of Artificial Sequence: Synthetic oligonucleotide
  misc_feature 1..20: note = Target: ANGPTL4; (-) strand; PAM type: YTN; PAM sequence: CTG
  source 1..20: mol_type = other DNA
ggttcaaatgattctcctgc

SEQ ID NO: 13355 - DNA, 20 bp, synthetic construct
  misc_feature 1..20: note = Description of Artificial Sequence: Synthetic oligonucleotide
  misc_feature 1..20: note = Target: ANGPTL4; (-) strand; PAM type: YTN; PAM sequence: CTC
  source 1..20: mol_type = other DNA
ctgggttcaaatgattctcc

SEQ ID NO: 13356 - DNA, 20 bp, synthetic construct
  misc_feature 1..20: note = Description of Artificial Sequence: Synthetic oligonucleotide
  misc_feature 1..20: note = Target: ANGPTL4; (-) strand; PAM type: YTN; PAM sequence: TTC
  source 1..20: mol_type = other DNA
cacctcctgggttcaaatga

SEQ ID NO: 13357 - DNA, 20 bp, synthetic construct
  misc_feature 1..20: note = Description of Artificial Sequence: Synthetic oligonucleotide
  misc_feature 1..20: note = Target: ANGPTL4; (-) strand; PAM type: YTN; PAM sequence: CTT
  source 1..20: mol_type = other DNA
ccacctcctgggttcaaatg

SEQ ID NO: 13358 - DNA, 20 bp, synthetic construct
  misc_feature 1..20: note = Description of Artificial Sequence: Synthetic oligonucleotide
  misc_feature 1..20: note = Target: ANGPTL4; (-) strand; PAM type: YTN; PAM sequence: CTG
  source 1..20: mol_type = other DNA
caacttccacctcctgggtt

SEQ ID NO: 13359 - DNA, 20 bp, synthetic construct
  misc_feature 1..20: note = Description of Artificial Sequence: Synthetic oligonucleotide
  misc_feature 1..20: note = Target: ANGPTL4; (-) strand; PAM type: YTN; PAM sequence: CTC
  source 1..20: mol_type = other DNA
actgcaacttccacctcctg

SEQ ID NO: 13360 - DNA, 20 bp, synthetic construct
  misc_feature 1..20: note = Description of Artificial Sequence: Synthetic oligonucleotide
  misc_feature 1..20: note = Target: ANGPTL4; (-) strand; PAM type: YTN; PAM sequence: CTG
  source 1..20: mol_type = other DNA
ctcactgcaacttccacctc

SEQ ID NO: 13361 - DNA, 20 bp, synthetic construct
  misc_feature 1..20: note = Description of Artificial Sequence: Synthetic oligonucleotide
  misc_feature 1..20: note = Target: ANGPTL4; (-) strand; PAM type: YTN; PAM sequence: CTC
  source 1..20: mol_type = other DNA
tgctcactgcaacttccacc

SEQ ID NO: 13362 - DNA, 20 bp, synthetic construct
  misc_feature 1..20: note = Description of Artificial Sequence: Synthetic oligonucleotide
  misc_feature 1..20: note = Target: ANGPTL4; (-) strand; PAM type: YTN; PAM sequence: CTG
  source 1..20: mol_type = other DNA
gagtgcagtggtgcaatctc

SEQ ID NO: 13363 - DNA, 20 bp, synthetic construct
  misc_feature 1..20: note = Description of Artificial Sequence: Synthetic oligonucleotide
  misc_feature 1..20: note = Target: ANGPTL4; (-) strand; PAM type: YTN; PAM sequence: CTG
  source 1..20: mol_type = other DNA
tcgccaaggctggagtgcag

SEQ ID NO: 13364 - DNA, 20 bp, synthetic construct
  misc_feature 1..20: note = Description of Artificial Sequence: Synthetic oligonucleotide
  misc_feature 1..20: note = Target: ANGPTL4; (-) strand; PAM type: YTN; PAM sequence: CTC
  source 1..20: mol_type = other DNA
tgtcgccaaggctggagtgc

SEQ ID NO: 13365 - DNA, 20 bp, synthetic construct
  misc_feature 1..20: note = Description of Artificial Sequence: Synthetic oligonucleotide
  misc_feature 1..20: note = Target: ANGPTL4; (-) strand; PAM type: YTN; PAM sequence: TTG
  source 1..20: mol_type = other DNA
ctctgtcgccaaggctggag

SEQ ID NO: 13366 - DNA, 20 bp, synthetic construct
  misc_feature 1..20: note = Description of Artificial Sequence: Synthetic oligonucleotide
  misc_feature 1..20: note = Target: ANGPTL4; (-) strand; PAM type: YTN; PAM sequence: CTT
  source 1..20: mol_type = other DNA
gctctgtcgccaaggctgga

SEQ ID NO: 13367 - DNA, 20 bp, synthetic construct
  misc_feature 1..20: note = Description of Artificial Sequence: Synthetic oligonucleotide
  misc_feature 1..20: note = Target: ANGPTL4; (-) strand; PAM type: YTN; PAM sequence: TTG
  source 1..20: mol_type = other DNA
agacagagtcttgctctgtc

SEQ ID NO: 13368 - DNA, 20 bp, synthetic construct
  misc_feature 1..20: note = Description of Artificial Sequence: Synthetic oligonucleotide
  misc_feature 1..20: note = Target: ANGPTL4; (-) strand; PAM type: YTN; PAM sequence: TTT
  source 1..20: mol_type = other DNA
gagacagagtcttgctctgt

SEQ ID NO: 13369 - DNA, 20 bp, synthetic construct
  misc_feature 1..20: note = Description of Artificial Sequence: Synthetic oligonucleotide
  misc_feature 1..20: note = Target: ANGPTL4; (-) strand; PAM type: YTN; PAM sequence: TTT
  source 1..20: mol_type = other DNA
tgagacagagtcttgctctg

SEQ ID NO: 13370 - DNA, 20 bp, synthetic construct
  misc_feature 1..20: note = Description of Artificial Sequence: Synthetic oligonucleotide
  misc_feature 1..20: note = Target: ANGPTL4; (-) strand; PAM type: YTN; PAM sequence: TTT
  source 1..20: mol_type = other DNA
ttgagacagagtcttgctct

SEQ ID NO: 13371 - DNA, 20 bp, synthetic construct
  misc_feature 1..20: note = Description of Artificial Sequence: Synthetic oligonucleotide
  misc_feature 1..20: note = Target: ANGPTL4; (-) strand; PAM type: YTN; PAM sequence: TTT
  source 1..20: mol_type = other DNA
tttgagacagagtcttgctc

SEQ ID NO: 13372 - DNA, 20 bp, synthetic construct
  misc_feature 1..20: note = Description of Artificial Sequence: Synthetic oligonucleotide
  misc_feature 1..20: note = Target: ANGPTL4; (-) strand; PAM type: YTN; PAM sequence: TTT
  source 1..20: mol_type = other DNA
ttttgagacagagtcttgct

SEQ ID NO: 13373 - DNA, 20 bp, synthetic construct
  misc_feature 1..20: note = Description of Artificial Sequence: Synthetic oligonucleotide
  misc_feature 1..20: note = Target: ANGPTL4; (-) strand; PAM type: YTN; PAM sequence: TTT
  source 1..20: mol_type = other DNA
tttttgagacagagtcttgc

SEQ ID NO: 13374 - DNA, 20 bp, synthetic construct
  misc_feature 1..20: note = Description of Artificial Sequence: Synthetic oligonucleotide
  misc_feature 1..20: note = Target: ANGPTL4; (-) strand; PAM type: YTN; PAM sequence: CTT
  source 1..20: mol_type = other DNA
ttttttgagacagagtcttg

SEQ ID NO: 13375 - DNA, 20 bp, synthetic construct
  misc_feature 1..20: note = Description of Artificial Sequence: Synthetic oligonucleotide
  misc_feature 1..20: note = Target: ANGPTL4; (-) strand; PAM type: YTN; PAM sequence: TTC
  source 1..20: mol_type = other DNA
ttttttttgagacagagtct

SEQ ID NO: 13376 - DNA, 20 bp, synthetic construct
  misc_feature 1..20: note = Description of Artificial Sequence: Synthetic oligonucleotide
  misc_feature 1..20: note = Target: ANGPTL4; (-) strand; PAM type: YTN; PAM sequence: TTT
  source 1..20: mol_type = other DNA
cttttttttgagacagagtc

SEQ ID NO: 13377 - DNA, 20 bp, synthetic construct
  misc_feature 1..20: note = Description of Artificial Sequence: Synthetic oligonucleotide
  misc_feature 1..20: note = Target: ANGPTL4; (-) strand; PAM type: YTN; PAM sequence: TTT
  source 1..20: mol_type = other DNA
tcttttttttgagacagagt

SEQ ID NO: 13378 - DNA, 20 bp, synthetic construct
  misc_feature 1..20: note = Description of Artificial Sequence: Synthetic oligonucleotide
  misc_feature 1..20: note = Target: ANGPTL4; (-) strand; PAM type: YTN; PAM sequence: TTT
  source 1..20: mol_type = other DNA
ttcttttttttgagacagag

SEQ ID NO: 13379 - DNA, 20 bp, synthetic construct
  misc_feature 1..20: note = Description of Artificial Sequence: Synthetic oligonucleotide
  misc_feature 1..20: note = Target: ANGPTL4; (-) strand; PAM type: YTN; PAM sequence: TTT
  source 1..20: mol_type = other DNA
tttcttttttttgagacaga

SEQ ID NO: 13380 - DNA, 20 bp, synthetic construct
  misc_feature 1..20: note = Description of Artificial Sequence: Synthetic oligonucleotide
  misc_feature 1..20: note = Target: ANGPTL4; (-) strand; PAM type: YTN; PAM sequence: TTT
  source 1..20: mol_type = other DNA
ttttcttttttttgagacag

SEQ ID NO: 13381 - DNA, 20 bp, synthetic construct
  misc_feature 1..20: note = Description of Artificial Sequence: Synthetic oligonucleotide
  misc_feature 1..20: note = Target: ANGPTL4; (-) strand; PAM type: YTN; PAM sequence: TTT
  source 1..20: mol_type = other DNA
tttttcttttttttgagaca

SEQ ID NO: 13382 - DNA, 20 bp, synthetic construct
  misc_feature 1..20: note = Description of Artificial Sequence: Synthetic oligonucleotide
  misc_feature 1..20: note = Target: ANGPTL4; (-) strand; PAM type: YTN; PAM sequence: TTT
  source 1..20: mol_type = other DNA
ttttttcttttttttgagac

SEQ ID NO: 13383 - DNA, 20 bp, synthetic construct
  misc_feature 1..20: note = Description of Artificial Sequence: Synthetic oligonucleotide
  misc_feature 1..20: note = Target: ANGPTL4; (-) strand; PAM type: YTN; PAM sequence: TTT
  source 1..20: mol_type = other DNA
tttttttcttttttttgaga

SEQ ID NO: 13384 - DNA, 20 bp, synthetic construct
  misc_feature 1..20: note = Description of Artificial Sequence: Synthetic oligonucleotide
  misc_feature 1..20: note = Target: ANGPTL4; (-) strand; PAM type: YTN; PAM sequence: CTT
  source 1..20: mol_type = other DNA
ttttttttcttttttttgag

SEQ ID NO: 13385 - DNA, 20 bp, synthetic construct
  misc_feature 1..20: note = Description of Artificial Sequence: Synthetic oligonucleotide
  misc_feature 1..20: note = Target: ANGPTL4; (-) strand; PAM type: YTN; PAM sequence: TTC
  source 1..20: mol_type = other DNA
ttttttttttcttttttttg

SEQ ID NO: 13386 - DNA, 20 bp, synthetic construct
  misc_feature 1..20: note = Description of Artificial Sequence: Synthetic oligonucleotide
  misc_feature 1..20: note = Target: ANGPTL4; (-) strand; PAM type: YTN; PAM sequence: TTT
  source 1..20: mol_type = other DNA
cttttttttttctttttttt

SEQ ID NO: 13387 - DNA, 20 bp, synthetic construct
  misc_feature 1..20: note = Description of Artificial Sequence: Synthetic oligonucleotide
  misc_feature 1..20: note = Target: ANGPTL4; (-) strand; PAM type: YTN; PAM sequence: TTT
  source 1..20: mol_type = other DNA
tcttttttttttcttttttt

SEQ ID NO: 13388 - DNA, 20 bp, synthetic construct
  misc_feature 1..20: note = Description of Artificial Sequence: Synthetic oligonucleotide
  misc_feature 1..20: note = Target: ANGPTL4; (-) strand; PAM type: YTN; PAM sequence: CTT
  source 1..20: mol_type = other DNA
ttcttttttttttctttttt

SEQ ID NO: 13389 - DNA, 20 bp, synthetic construct
  misc_feature 1..20: note = Description of Artificial Sequence: Synthetic oligonucleotide
  misc_feature 1..20: note = Target: ANGPTL4; (-) strand; PAM type: YTN; PAM sequence: TTC
  source 1..20: mol_type = other DNA
ttttcttttttttttctttt

SEQ ID NO: 13390 - DNA, 20 bp, synthetic construct
  misc_feature 1..20: note = Description of Artificial Sequence: Synthetic oligonucleotide
  misc_feature 1..20: note = Target: ANGPTL4; (-) strand; PAM type: YTN; PAM sequence: TTT
  source 1..20: mol_type = other DNA
cttttcttttttttttcttt

SEQ ID NO: 13391 - DNA, 20 bp, synthetic construct
  misc_feature 1..20: note = Description of Artificial Sequence: Synthetic oligonucleotide
  misc_feature 1..20: note = Target: ANGPTL4; (-) strand; PAM type: YTN; PAM sequence: TTT
  source 1..20: mol_type = other DNA
tcttttcttttttttttctt

SEQ ID NO: 13392 - DNA, 20 bp, synthetic construct
  misc_feature 1..20: note = Description of Artificial Sequence: Synthetic oligonucleotide
  misc_feature 1..20: note = Target: ANGPTL4; (-) strand; PAM type: YTN; PAM sequence: CTT
  source 1..20: mol_type = other DNA
ttcttttcttttttttttct

SEQ ID NO: 13393 - DNA, 20 bp, synthetic construct
  misc_feature 1..20: note = Description of Artificial Sequence: Synthetic oligonucleotide
  misc_feature 1..20: note = Target: ANGPTL4; (-) strand; PAM type: YTN; PAM sequence: TTC
  source 1..20: mol_type = other DNA
ttttcttttctttttttttt

SEQ ID NO: 13394 - DNA, 20 bp, synthetic construct
  misc_feature 1..20: note = Description of Artificial Sequence: Synthetic oligonucleotide
  misc_feature 1..20: note = Target: ANGPTL4; (-) strand; PAM type: YTN; PAM sequence: TTT
  source 1..20: mol_type = other DNA
cttttcttttcttttttttt

SEQ ID NO: 13395 - DNA, 20 bp, synthetic construct
  misc_feature 1..20: note = Description of Artificial Sequence: Synthetic oligonucleotide
  misc_feature 1..20: note = Target: ANGPTL4; (-) strand; PAM type: YTN; PAM sequence: TTT
  source 1..20: mol_type = other DNA
tcttttcttttctttttttt

SEQ ID NO: 13396 - DNA, 20 bp, synthetic construct
  misc_feature 1..20: note = Description of Artificial Sequence: Synthetic oligonucleotide
  misc_feature 1..20: note = Target: ANGPTL4; (-) strand; PAM type: YTN; PAM sequence: TTT
  source 1..20: mol_type = other DNA
ttcttttcttttcttttttt

SEQ ID NO: 13397 - DNA, 20 bp, synthetic construct
  misc_feature 1..20: note = Description of Artificial Sequence: Synthetic oligonucleotide
  misc_feature 1..20: note = Target: ANGPTL4; (-) strand; PAM type: YTN; PAM sequence: TTT
  source 1..20: mol_type = other DNA
tttcttttcttttctttttt

SEQ ID NO: 13398 - DNA, 20 bp, synthetic construct
  misc_feature 1..20: note = Description of Artificial Sequence: Synthetic oligonucleotide
  misc_feature 1..20: note = Target: ANGPTL4; (-) strand; PAM type: YTN; PAM sequence: TTT
  source 1..20: mol_type = other DNA
ttttcttttcttttcttttt

SEQ ID NO: 13399 - DNA, 20 bp, synthetic construct
  misc_feature 1..20: note = Description of Artificial Sequence: Synthetic oligonucleotide
  misc_feature 1..20: note = Target: ANGPTL4; (-) strand; PAM type: YTN; PAM sequence: TTT
  source 1..20: mol_type = other DNA
tttttcttttcttttctttt

SEQ ID NO: 13400 - DNA, 20 bp, synthetic construct
  misc_feature 1..20: note = Description of Artificial Sequence: Synthetic oligonucleotide
  misc_feature 1..20: note = Target: ANGPTL4; (-) strand; PAM type: YTN; PAM sequence: CTT
  source 1..20: mol_type = other DNA
ttttttcttttcttttcttt

SEQ ID NO: 13401 - DNA, 20 bp, synthetic construct
  misc_feature 1..20: note = Description of Artificial Sequence: Synthetic oligonucleotide
  misc_feature 1..20: note = Target: ANGPTL4; (-) strand; PAM type: YTN; PAM sequence: TTC
  source 1..20: mol_type = other DNA
ttttttttcttttcttttct

SEQ ID NO: 13402 - DNA, 20 bp, synthetic construct
  misc_feature 1..20: note = Description of Artificial Sequence: Synthetic oligonucleotide
  misc_feature 1..20: note = Target: ANGPTL4; (-) strand; PAM type: YTN; PAM sequence: TTT
  source 1..20: mol_type = other DNA
cttttttttcttttcttttc

SEQ ID NO: 13403 - DNA, 20 bp, synthetic construct
  misc_feature 1..20: note = Description of Artificial Sequence: Synthetic oligonucleotide
  misc_feature 1..20: note = Target: ANGPTL4; (-) strand; PAM type: YTN; PAM sequence: TTT
  source 1..20: mol_type = other DNA
tcttttttttcttttctttt

SEQ ID NO: 13404 - DNA, 20 bp, synthetic construct
  misc_feature 1..20: note = Description of Artificial Sequence: Synthetic oligonucleotide
  misc_feature 1..20: note = Target: ANGPTL4; (-) strand; PAM type: YTN; PAM sequence: TTT
  source 1..20: mol_type = other DNA
ttcttttttttcttttcttt

SEQ ID NO: 13405 - DNA, 20 bp, synthetic construct
  misc_feature 1..20: note = Description of Artificial Sequence: Synthetic oligonucleotide
  misc_feature 1..20: note = Target: ANGPTL4; (-) strand; PAM type: YTN; PAM sequence: CTT
  source 1..20: mol_type = other DNA
tttcttttttttcttttctt

SEQ ID NO: 13406 - DNA, 20 bp, synthetic construct
  misc_feature 1..20: note = Description of Artificial Sequence: Synthetic oligonucleotide
  misc_feature 1..20: note = Target: ANGPTL4; (-) strand; PAM type: YTN; PAM sequence: TTC
  source 1..20: mol_type = other DNA
tttttcttttttttcttttc

SEQ ID NO: 13407 - DNA, 20 bp, synthetic construct
  misc_feature 1..20: note = Description of Artificial Sequence: Synthetic oligonucleotide
  misc_feature 1..20: note = Target: ANGPTL4; (-) strand; PAM type: YTN; PAM sequence: TTT
  source 1..20: mol_type = other DNA
ctttttcttttttttctttt

SEQ ID NO: 13408 - DNA, 20 bp, synthetic construct
  misc_feature 1..20: note = Description of Artificial Sequence: Synthetic oligonucleotide
  misc_feature 1..20: note = Target: ANGPTL4; (-) strand; PAM type: YTN; PAM sequence: TTT
  source 1..20: mol_type = other DNA
tctttttcttttttttcttt

SEQ ID NO: 13409 - DNA, 20 bp, synthetic construct
  misc_feature 1..20: note = Description of Artificial Sequence: Synthetic oligonucleotide
  misc_feature 1..20: note = Target: ANGPTL4; (-) strand; PAM type: YTN; PAM sequence: TTT
  source 1..20: mol_type = other DNA
ttctttttcttttttttctt

SEQ ID NO: 13410 - DNA, 20 bp, synthetic construct
  misc_feature 1..20: note = Description of Artificial Sequence: Synthetic oligonucleotide
  misc_feature 1..20: note = Target: ANGPTL4; (-) strand; PAM type: YTN; PAM sequence: TTT
  source 1..20: mol_type = other DNA
tttctttttcttttttttct

SEQ ID NO: 13411 - DNA, 20 bp, synthetic construct
  misc_feature 1..20: note = Description of Artificial Sequence: Synthetic oligonucleotide
  misc_feature 1..20: note = Target: ANGPTL4; (-) strand; PAM type: YTN; PAM sequence: TTT
  source 1..20: mol_type = other DNA
ttttctttttcttttttttc

SEQ ID NO: 13412 - DNA, 20 bp, synthetic construct
  misc_feature 1..20: note = Description of Artificial Sequence: Synthetic oligonucleotide
  misc_feature 1..20: note = Target: ANGPTL4; (-) strand; PAM type: YTN; PAM sequence: CTT
  source 1..20: mol_type = other DNA
tttttctttttctttttttt

SEQ ID NO: 13413 - DNA, 20 bp, synthetic construct
  misc_feature 1..20: note = Description of Artificial Sequence: Synthetic oligonucleotide
  misc_feature 1..20: note = Target: ANGPTL4; (-) strand; PAM type: YTN; PAM sequence: TTC
  source 1..20: mol_type = other DNA
tttttttctttttctttttt

SEQ ID NO: 13414 - DNA, 20 bp, synthetic construct
  misc_feature 1..20: note = Description of Artificial Sequence: Synthetic oligonucleotide
  misc_feature 1..20: note = Target: ANGPTL4; (-) strand; PAM type: YTN; PAM sequence: TTT
  source 1..20: mol_type = other DNA
ctttttttctttttcttttt

SEQ ID NO: 13415 - DNA, 20 bp, synthetic construct
  misc_feature 1..20: note = Description of Artificial Sequence: Synthetic oligonucleotide
  misc_feature 1..20: note = Target: ANGPTL4; (-) strand; PAM type: YTN; PAM sequence: TTA
  source 1..20: mol_type = other DNA
tgtatatttctttttttctt

SEQ ID NO: 13416 - DNA, 20 bp, synthetic construct
  misc_feature 1..20: note = Description of Artificial Sequence: Synthetic oligonucleotide
  misc_feature 1..20: note = Target: ANGPTL4; (-) strand; PAM type: YTN; PAM sequence: TTA
  source 1..20: mol_type = other DNA
tattatgtatatttcttttt

SEQ ID NO: 13417 - DNA, 20 bp, synthetic construct
  misc_feature 1..20: note = Description of Artificial Sequence: Synthetic oligonucleotide
  misc_feature 1..20: note = Target: ANGPTL4; (-) strand; PAM type: YTN; PAM sequence: TTT
  source 1..20: mol_type = other DNA
atattatgtatatttctttt

SEQ ID NO: 13418 - DNA, 20 bp, synthetic construct
  misc_feature 1..20: note = Description of Artificial Sequence: Synthetic oligonucleotide
  misc_feature 1..20: note = Target: ANGPTL4; (-) strand; PAM type: YTN; PAM sequence: TTT
  source 1..20: mol_type = other DNA
tatattatgtatatttcttt

SEQ ID NO: 13419 - DNA, 20 bp, synthetic construct
  misc_feature 1..20: note = Description of Artificial Sequence: Synthetic oligonucleotide
  misc_feature 1..20: note = Target: ANGPTL4; (-) strand; PAM type: YTN; PAM sequence: TTA
  source 1..20: mol_type = other DNA
aaatgaccaattttatatta

SEQ ID NO: 13420 - DNA, 20 bp, synthetic construct
  misc_feature 1..20: note = Description of Artificial Sequence: Synthetic oligonucleotide
  misc_feature 1..20: note = Target: ANGPTL4; (-) strand; PAM type: YTN; PAM sequence: TTG
  source 1..20: mol_type = other DNA
ttaaaatgaccaattttata

SEQ ID NO: 13421 - DNA, 20 bp, synthetic construct
  misc_feature 1..20: note = Description of Artificial Sequence: Synthetic oligonucleotide
  misc_feature 1..20: note = Target: ANGPTL4; (-) strand; PAM type: YTN; PAM sequence: TTA
  source 1..20: mol_type = other DNA
aaaattgttaaaatgaccaa

SEQ ID NO: 13422 - DNA, 20 bp, synthetic construct
  misc_feature 1..20: note = Description of Artificial Sequence: Synthetic oligonucleotide
  misc_feature 1..20: note = Target: ANGPTL4; (-) strand; PAM type: YTN; PAM sequence: TTG
  source 1..20: mol_type = other DNA
gccaacatagttaaaaattg

SEQ ID NO: 13423 - DNA, 20 bp, synthetic construct
  misc_feature 1..20: note = Description of Artificial Sequence: Synthetic oligonucleotide
  misc_feature 1..20: note = Target: ANGPTL4; (-) strand; PAM type: YTN; PAM sequence: TTT
  source 1..20: mol_type = other DNA
ggccaacatagttaaaaatt

SEQ ID NO: 13424 - DNA, 20 bp, synthetic construct
  misc_feature 1..20: note = Description of Artificial Sequence: Synthetic oligonucleotide
  misc_feature 1..20: note = Target: ANGPTL4; (-) strand; PAM type: YTN; PAM sequence: CTT
  source 1..20: mol_type = other DNA
tggccaacatagttaaaaat

SEQ ID NO: 13425 - DNA, 20 bp, synthetic construct
  misc_feature 1..20: note = Description of Artificial Sequence: Synthetic oligonucleotide
  misc_feature 1..20: note = Target: ANGPTL4; (-) strand; PAM type: YTN; PAM sequence: CTA
  source 1..20: mol_type = other DNA
ctttggccaacatagttaaa

SEQ ID NO: 13426 - DNA, 20 bp, synthetic construct
  misc_feature 1..20: note = Description of Artificial Sequence: Synthetic oligonucleotide
  misc_feature 1..20: note = Target: ANGPTL4; (-) strand; PAM type: YTN; PAM sequence: CTC
  source 1..20: mol_type = other DNA
caatcccaacgcgtgggcta

SEQ ID NO: 13427 - DNA, 20 bp, synthetic construct
  misc_feature 1..20: note = Description of Artificial Sequence: Synthetic oligonucleotide
  misc_feature 1..20: note = Target: ANGPTL4; (-) strand; PAM type: YTN; PAM sequence: CTG
  source 1..20: mol_type = other DNA
gggcgatcacggtgggcaag

SEQ ID NO: 13428 - DNA, 20 bp, synthetic construct
  misc_feature 1..20: note = Description of Artificial Sequence: Synthetic oligonucleotide
  misc_feature 1..20: note = Target: ANGPTL4; (-) strand; PAM type: YTN; PAM sequence: CTG
  source 1..20: mol_type = other DNA
tactggggcgatcacggtgg

SEQ ID NO: 13429 - DNA, 20 bp, synthetic construct
  misc_feature 1..20: note = Description of Artificial Sequence: Synthetic oligonucleotide
  misc_feature 1..20: note = Target: ANGPTL4; (-) strand; PAM type: YTN; PAM sequence: CTA
  source 1..20: mol_type = other DNA
tatgccaggcactgtactgg

SEQ ID NO: 13430 - DNA, 20 bp, synthetic construct
  misc_feature 1..20: note = Description of Artificial Sequence: Synthetic oligonucleotide
  misc_feature 1..20: note = Target: ANGPTL4; (-) strand; PAM type: YTN; PAM sequence: CTA
  source 1..20: mol_type = other DNA
ctatatgccaggcactgtac

SEQ ID NO: 13431 - DNA, 20 bp, synthetic construct
  misc_feature 1..20: note = Description of Artificial Sequence: Synthetic oligonucleotide
  misc_feature 1..20: note = Target: ANGPTL4; (-) strand; PAM type: YTN; PAM sequence: CTG
  source 1..20: mol_type = other DNA
gagcacctactatatgccag

SEQ ID NO: 13432 - DNA, 20 bp, synthetic construct
  misc_feature 1..20: note = Description of Artificial Sequence: Synthetic oligonucleotide
  misc_feature 1..20: note = Target: ANGPTL4; (-) strand; PAM type: YTN; PAM sequence: TTC
  source 1..20: mol_type = other DNA
ctggagcacctactatatgc

SEQ ID NO: 13433 - DNA, 20 bp, synthetic construct
  misc_feature 1..20: note = Description of Artificial Sequence: Synthetic oligonucleotide
  misc_feature 1..20: note = Target: ANGPTL4; (-) strand; PAM type: YTN; PAM sequence: TTG
  source 1..20: mol_type = other DNA
ttcctggagcacctactata

SEQ ID NO: 13434 - DNA, 20 bp, synthetic construct
  misc_feature 1..20: note = Description of Artificial Sequence: Synthetic oligonucleotide
  misc_feature 1..20: note = Target: ANGPTL4; (-) strand; PAM type: YTN; PAM sequence: CTG
  source 1..20: mol_type = other DNA
atcaattgttcctggagcac

SEQ ID NO: 13435 - DNA, 20 bp, synthetic construct
  misc_feature 1..20: note = Description of Artificial Sequence: Synthetic oligonucleotide
  misc_feature 1..20: note = Target: ANGPTL4; (-) strand; PAM type: YTN; PAM sequence: TTA
  source 1..20: mol_type = other DNA
cccagcaaagacaaagtcat

SEQ ID NO: 13436 - DNA, 20 bp, synthetic construct
  misc_feature 1..20: note = Description of Artificial Sequence: Synthetic oligonucleotide
  misc_feature 1..20: note = Target: ANGPTL4; (-) strand; PAM type: YTN; PAM sequence: CTT
  source 1..20: mol_type = other DNA
acccagcaaagacaaagtca

SEQ ID NO: 13437 - DNA, 20 bp, synthetic construct
  misc_feature 1..20: note = Description of Artificial Sequence: Synthetic oligonucleotide
  misc_feature 1..20: note = Target: ANGPTL4; (-) strand; PAM type: YTN; PAM sequence: CTC
  source 1..20: mol_type = other DNA
ttacccagcaaagacaaagt

SEQ ID NO: 13438 - DNA, 20 bp, synthetic construct
  misc_feature 1..20: note = Description of Artificial Sequence: Synthetic oligonucleotide
  misc_feature 1..20: note = Target: ANGPTL4; (-) strand; PAM type: YTN; PAM sequence: TTA
  source 1..20: mol_type = other DNA
gaatgtggcctcttacccag

SEQ ID NO: 13439 - DNA, 20 bp, synthetic construct
  misc_feature 1..20: note = Description of Artificial Sequence: Synthetic oligonucleotide
  misc_feature 1..20: note = Target: ANGPTL4; (-) strand; PAM type: YTN; PAM sequence: TTT
  source 1..20: mol_type = other DNA
agaatgtggcctcttaccca

SEQ ID NO: 13440 - DNA, 20 bp, synthetic construct
  misc_feature 1..20: note = Description of Artificial Sequence: Synthetic oligonucleotide
  misc_feature 1..20: note = Target: ANGPTL4; (-) strand; PAM type: YTN; PAM sequence: CTT
  source 1..20: mol_type = other DNA
tagaatgtggcctcttaccc

SEQ ID NO: 13441 - DNA, 20 bp, synthetic construct
  misc_feature 1..20: note = Description of Artificial Sequence: Synthetic oligonucleotide
  misc_feature 1..20: note = Target: ANGPTL4; (-) strand; PAM type: YTN; PAM sequence: CTG
  source 1..20: mol_type = other DNA
acctttagaatgtggcctct

SEQ ID NO: 13442 - DNA, 20 bp, synthetic construct
  misc_feature 1..20: note = Description of Artificial Sequence: Synthetic oligonucleotide
  misc_feature 1..20: note = Target: ANGPTL4; (-) strand; PAM type: YTN; PAM sequence: CTG
  source 1..20: mol_type = other DNA
gccaaaaactgacctttaga

SEQ ID NO: 13443 - DNA, 20 bp, synthetic construct
  misc_feature 1..20: note = Description of Artificial Sequence: Synthetic oligonucleotide
  misc_feature 1..20: note = Target: ANGPTL4; (-) strand; PAM type: YTN; PAM sequence: CTG
  source 1..20: mol_type = other DNA
tgcctggccaaaaactgacc

SEQ ID NO: 13444 - DNA, 20 bp, synthetic construct
  misc_feature 1..20: note = Description of Artificial Sequence: Synthetic oligonucleotide
  misc_feature 1..20: note = Target: ANGPTL4; (-) strand; PAM type: YTN; PAM sequence: CTG
  source 1..20: mol_type = other DNA
ggatgacaggtgtgagtcac

SEQ ID NO: 13445 - DNA, 20 bp, synthetic construct
  misc_feature 1..20: note = Description of Artificial Sequence: Synthetic oligonucleotide
  misc_feature 1..20: note = Target: ANGPTL4; (-) strand; PAM type: YTN; PAM sequence: CTC
  source 1..20: mol_type = other DNA
ccaaagtgctgggatgacag

SEQ ID NO: 13446 - DNA, 20 bp, synthetic construct
  misc_feature 1..20: note = Description of Artificial Sequence: Synthetic oligonucleotide
  misc_feature 1..20: note = Target: ANGPTL4; (-) strand; PAM type: YTN; PAM sequence: CTC
  source 1..20: mol_type = other DNA
ggcctcccaaagtgctggga

SEQ ID NO: 13447 - DNA, 20 bp, synthetic construct
  misc_feature 1..20: note = Description of Artificial Sequence: Synthetic oligonucleotide
  misc_feature 1..20: note = Target: ANGPTL4; (-) strand; PAM type: YTN; PAM sequence: CTC
  source 1..20: mol_type = other DNA
gcctcggcctcccaaagtgc

SEQ ID NO: 13448 - DNA, 20 bp, synthetic construct
  misc_feature 1..20: note = Description of Artificial Sequence: Synthetic oligonucleotide
  misc_feature 1..20: note = Target: ANGPTL4; (-) strand; PAM type: YTN; PAM sequence: TTC
  source 1..20: mol_type = other DNA
actcgcctcggcctcccaaa

SEQ ID NO: 13449 - DNA, 20 bp, synthetic construct
  misc_feature 1..20: note = Description of Artificial Sequence: Synthetic oligonucleotide
  misc_feature 1..20: note = Target: ANGPTL4; (-) strand; PAM type: YTN; PAM sequence: CTC
  source 1..20: mol_type = other DNA
aagggattcactcgcctcgg

SEQ ID NO: 13450 - DNA, 20 bp, synthetic construct
  misc_feature 1..20: note = Description of Artificial Sequence: Synthetic oligonucleotide
  misc_feature 1..20: note = Target: ANGPTL4; (-) strand; PAM type: YTN; PAM sequence: CTG
  source 1..20: mol_type = other DNA
agctcaagggattcactcgc

SEQ ID NO: 13451 - DNA, 20 bp, synthetic construct
  misc_feature 1..20: note = Description of Artificial Sequence: Synthetic oligonucleotide
  misc_feature 1..20: note = Target: ANGPTL4; (-) strand; PAM type: YTN; PAM sequence: CTC
  source 1..20: mol_type = other DNA
ctgagctcaagggattcact

SEQ ID NO: 13452 - DNA, 20 bp, synthetic construct
  misc_feature 1..20: note = Description of Artificial Sequence: Synthetic oligonucleotide
  misc_feature 1..20: note = Target: ANGPTL4; (-) strand; PAM type: YTN; PAM sequence: TTG
  source 1..20: mol_type = other DNA
aactcctgagctcaagggat

SEQ ID NO: 13453 - DNA, 20 bp, synthetic construct
  misc_feature 1..20: note = Description of Artificial Sequence: Synthetic oligonucleotide
  misc_feature 1..20: note = Target: ANGPTL4; (-) strand; PAM type: YTN; PAM sequence: CTT
  source 1..20: mol_type = other DNA
gaactcctgagctcaaggga

SEQ ID NO: 13454 - DNA, 20 bp, synthetic construct
  misc_feature 1..20: note = Description of Artificial Sequence: Synthetic oligonucleotide
  misc_feature 1..20: note = Target: ANGPTL4; (-) strand; PAM type: YTN; PAM sequence: CTG
  source 1..20: mol_type = other DNA
gtcttgaactcctgagctca

SEQ ID NO: 13455 - DNA, 20 bp, synthetic construct
  misc_feature 1..20: note = Description of Artificial Sequence: Synthetic oligonucleotide
  misc_feature 1..20: note = Target: ANGPTL4; (-) strand; PAM type: YTN; PAM sequence: TTG
  source 1..20: mol_type = other DNA
cccaggctggtcttgaactc

SEQ ID NO: 13456 - DNA, 20 bp, synthetic construct
  misc_feature 1..20: note = Description of Artificial Sequence: Synthetic oligonucleotide
  misc_feature 1..20: note = Target: ANGPTL4; (-) strand; PAM type: YTN; PAM sequence: TTG
  source 1..20: mol_type = other DNA
ccgtgttgcccaggctggtc

SEQ ID NO: 13457 - DNA, 20 bp, synthetic construct
  misc_feature 1..20: note = Description of Artificial Sequence: Synthetic oligonucleotide
  misc_feature 1..20: note = Target: ANGPTL4; (-) strand; PAM type: YTN; PAM sequence: TTT
  source 1..20: mol_type = other DNA
gccgtgttgcccaggctggt

SEQ ID NO: 13458 - DNA, 20 bp, synthetic construct
  misc_feature 1..20: note = Description of Artificial Sequence: Synthetic oligonucleotide
  misc_feature 1..20: note = Target: ANGPTL4; (-) strand; PAM type: YTN; PAM sequence: TTT
  source 1..20: mol_type = other DNA
tgccgtgttgcccaggctgg

SEQ ID NO: 13459 - DNA, 20 bp, synthetic construct
  misc_feature 1..20: note = Description of Artificial Sequence: Synthetic oligonucleotide
  misc_feature 1..20: note = Target: ANGPTL4; (-) strand; PAM type: YTN; PAM sequence: TTT
  source 1..20: mol_type = other DNA
ttgccgtgttgcccaggctg

SEQ ID NO: 13460 - DNA, 20 bp, synthetic construct
  misc_feature 1..20: note = Description of Artificial Sequence: Synthetic oligonucleotide
  misc_feature 1..20: note = Target: ANGPTL4; (-) strand; PAM type: YTN; PAM sequence: TTG
  source 1..20: mol_type = other DNA
tagagacaggatttttgccg

SEQ ID NO: 13461 - DNA, 20 bp, synthetic construct
  misc_feature 1..20: note = Description of Artificial Sequence: Synthetic oligonucleotide
  misc_feature 1..20: note = Target: ANGPTL4; (-) strand; PAM type: YTN; PAM sequence: TTT
  source 1..20: mol_type = other DNA
gtagagacaggatttttgcc

SEQ ID NO: 13462 - DNA, 20 bp, synthetic construct
  misc_feature 1..20: note = Description of Artificial Sequence: Synthetic oligonucleotide
  misc_feature 1..20: note = Target: ANGPTL4; (-) strand; PAM type: YTN; PAM sequence: TTT
  source 1..20: mol_type = other DNA
tgtagagacaggatttttgc

SEQ ID NO: 13463 - DNA, 20 bp, synthetic construct
  misc_feature 1..20: note = Description of Artificial Sequence: Synthetic oligonucleotide
  misc_feature 1..20: note = Target: ANGPTL4; (-) strand; PAM type: YTN; PAM sequence: CTG
  source 1..20: mol_type = other DNA
tagattttgtagagacagga

SEQ ID NO: 13464 - DNA, 20 bp, synthetic construct
  misc_feature 1..20: note = Description of Artificial Sequence: Synthetic oligonucleotide
  misc_feature 1..20: note = Target: ANGPTL4; (-) strand; PAM type: YTN; PAM sequence: TTC
  source 1..20: mol_type = other DNA
tgtagattttgtagagacag

SEQ ID NO: 13465 - DNA, 20 bp, synthetic construct
  misc_feature 1..20: note = Description of Artificial Sequence: Synthetic oligonucleotide
  misc_feature 1..20: note = Target: ANGPTL4; (-) strand; PAM type: YTN; PAM sequence: TTT
  source 1..20: mol_type = other DNA
ctgtagattttgtagagaca

SEQ ID NO: 13466 - DNA, 20 bp, synthetic construct
  misc_feature 1..20: note = Description of Artificial Sequence: Synthetic oligonucleotide
  misc_feature 1..20: note = Target: ANGPTL4; (-) strand; PAM type: YTN; PAM sequence: CTA
  source 1..20: mol_type = other DNA
atttctgtagattttgtaga

SEQ ID NO: 13467 - DNA, 20 bp, synthetic construct
  misc_feature 1..20: note = Description of Artificial Sequence: Synthetic oligonucleotide
  misc_feature 1..20: note = Target: ANGPTL4; (-) strand; PAM type: YTN; PAM sequence: CTG
  source 1..20: mol_type = other DNA
cctaatttctgtagattttg

SEQ ID NO: 13468 - DNA, 20 bp, synthetic construct
  misc_feature 1..20: note = Description of Artificial Sequence: Synthetic oligonucleotide
  misc_feature 1..20: note = Target: ANGPTL4; (-) strand; PAM type: YTN; PAM sequence: CTA
  source 1..20: mol_type = other DNA
taggcatgtgccaccagacc

SEQ ID NO: 13469 - DNA, 20 bp, synthetic construct
  misc_feature 1..20: note = Description of Artificial Sequence: Synthetic oligonucleotide
  misc_feature 1..20: note = Target: ANGPTL4; (-) strand; PAM type: YTN; PAM sequence: CTG
  source 1..20: mol_type = other DNA
ggactataggcatgtgccac

SEQ ID NO: 13470 - DNA, 20 bp, synthetic construct
  misc_feature 1..20: note = Description of Artificial Sequence: Synthetic oligonucleotide
  misc_feature 1..20: note = Target: ANGPTL4; (-) strand; PAM type: YTN; PAM sequence: CTC
  source 1..20: mol_type = other DNA
ccaagcagctgggactatag

SEQ ID NO: 13471 - DNA, 20 bp, synthetic construct
  misc_feature 1..20: note = Description of Artificial Sequence: Synthetic oligonucleotide
  misc_feature 1..20: note = Target: ANGPTL4; (-) strand; PAM type: YTN; PAM sequence: CTC
  source 1..20: mol_type = other DNA
agcctcccaagcagctggga

SEQ ID NO: 13472 - DNA, 20 bp, synthetic construct
  misc_feature 1..20: note = Description of Artificial Sequence: Synthetic oligonucleotide
  misc_feature 1..20: note = Target: ANGPTL4; (-) strand; PAM type: YTN; PAM sequence: CTC
  source 1..20: mol_type = other DNA
ccacctcagcctcccaagca

SEQ ID NO: 13473 - DNA, 20 bp, synthetic construct
  misc_feature 1..20: note = Description of Artificial Sequence: Synthetic oligonucleotide
  misc_feature 1..20: note = Target: ANGPTL4; (-) strand; PAM type: YTN; PAM sequence: CTC
  source 1..20: mol_type = other DNA
aagtgatcctcccacctcag

SEQ ID NO: 13474 - DNA, 20 bp, synthetic construct
  misc_feature 1..20: note = Description of Artificial Sequence: Synthetic oligonucleotide
  misc_feature 1..20: note = Target: ANGPTL4; (-) strand; PAM type: YTN; PAM sequence: CTC
  source 1..20: mol_type = other DNA
ccaggctcaagtgatcctcc

SEQ ID NO: 13475 - DNA, 20 bp, synthetic construct
  misc_feature 1..20: note = Description of Artificial Sequence: Synthetic oligonucleotide
  misc_feature 1..20: note = Target: ANGPTL4; (-) strand; PAM type: YTN; PAM sequence: CTC
  source 1..20: mol_type = other DNA
aaactcccaggctcaagtga

SEQ ID NO: 13476 - DNA, 20 bp, synthetic construct
  misc_feature 1..20: note = Description of Artificial Sequence: Synthetic oligonucleotide
  misc_feature 1..20: note = Target: ANGPTL4; (-) strand; PAM type: YTN; PAM sequence: CTC
  source 1..20: mol_type = other DNA
accgcaacctcaaactccca

SEQ ID NO: 13477 - DNA, 20 bp, synthetic construct
  misc_feature 1..20: note = Description of Artificial Sequence: Synthetic oligonucleotide
  misc_feature 1..20: note = Target: ANGPTL4; (-) strand; PAM type: YTN; PAM sequence: CTG
  source 1..20: mol_type = other DNA
gagtgcagtgtcacaatcac

SEQ ID NO: 13478 - DNA, 20 bp, synthetic construct
  misc_feature 1..20: note = Description of Artificial Sequence: Synthetic oligonucleotide
  misc_feature 1..20: note = Target: ANGPTL4; (-) strand; PAM type: YTN; PAM sequence: CTC
  source 1..20: mol_type = other DNA
acccaggctggagtgcagtg

SEQ ID NO: 13479 - DNA, 20 bp, synthetic construct
  misc_feature 1..20: note = Description of Artificial Sequence: Synthetic oligonucleotide
  misc_feature 1..20: note = Target: ANGPTL4; (-) strand; PAM type: YTN; PAM sequence: CTC
  source 1..20: mol_type = other DNA
actcacccaggctggagtgc

SEQ ID NO: 13480 - DNA, 20 bp, synthetic construct
  misc_feature 1..20: note = Description of Artificial Sequence: Synthetic oligonucleotide
  misc_feature 1..20: note = Target: ANGPTL4; (-) strand; PAM type: YTN; PAM sequence: CTG
  source 1..20: mol_type = other DNA
agatgggtctcactcaccca

SEQ ID NO: 13481 - DNA, 20 bp, synthetic construct
  misc_feature 1..20: note = Description of Artificial Sequence: Synthetic oligonucleotide
  misc_feature 1..20: note = Target: ANGPTL4; (-) strand; PAM type: YTN; PAM sequence: TTC
  source 1..20: mol_type = other DNA
tgagatgggtctcactcacc

SEQ ID NO: 13482 - DNA, 20 bp, synthetic construct
  misc_feature 1..20: note = Description of Artificial Sequence: Synthetic oligonucleotide
  misc_feature 1..20: note = Target: ANGPTL4; (-) strand; PAM type: YTN; PAM sequence: TTT
  source 1..20: mol_type = other DNA
ctgagatgggtctcactcac

SEQ ID NO: 13483 - DNA, 20 bp, synthetic construct
  misc_feature 1..20: note = Description of Artificial Sequence: Synthetic oligonucleotide
  misc_feature 1..20: note = Target: ANGPTL4; (-) strand; PAM type: YTN; PAM sequence: TTT
  source 1..20: mol_type = other DNA
tctgagatgggtctcactca

SEQ ID NO: 13484 - DNA, 20 bp, synthetic construct
  misc_feature 1..20: note = Description of Artificial Sequence: Synthetic oligonucleotide
  misc_feature 1..20: note = Target: ANGPTL4; (-) strand; PAM type: YTN; PAM sequence: TTT
  source 1..20: mol_type = other DNA
ttctgagatgggtctcactc

SEQ ID NO: 13485 - DNA, 20 bp, synthetic construct
  misc_feature 1..20: note = Description of Artificial Sequence: Synthetic oligonucleotide
  misc_feature 1..20: note = Target: ANGPTL4; (-) strand; PAM type: YTN; PAM sequence: TTT
  source 1..20: mol_type = other DNA
tttctgagatgggtctcact

SEQ ID NO: 13486 - DNA, 20 bp, synthetic construct
  misc_feature 1..20: note = Description of Artificial Sequence: Synthetic oligonucleotide
  misc_feature 1..20: note = Target: ANGPTL4; (-) strand; PAM type: YTN; PAM sequence: TTT
  source 1..20: mol_type = other DNA
ttttctgagatgggtctcac

SEQ ID NO: 13487 - DNA, 20 bp, synthetic construct
  misc_feature 1..20: note = Description of Artificial Sequence: Synthetic oligonucleotide
  misc_feature 1..20: note = Target: ANGPTL4; (-) strand; PAM type: YTN; PAM sequence: TTT
  source 1..20: mol_type = other DNA
tttttctgagatgggtctca

SEQ ID NO: 13488 - DNA, 20 bp, synthetic construct
  misc_feature 1..20: note = Description of Artificial Sequence: Synthetic oligonucleotide
  misc_feature 1..20: note = Target: ANGPTL4; (-) strand; PAM type: YTN; PAM sequence: TTT
  source 1..20: mol_type = other DNA
ttttttctgagatgggtctc

SEQ ID NO: 13489 - DNA, 20 bp, synthetic construct
  misc_feature 1..20: note = Description of Artificial Sequence: Synthetic oligonucleotide
  misc_feature 1..20: note = Target: ANGPTL4; (-) strand; PAM type: YTN; PAM sequence: TTT
  source 1..20: mol_type = other DNA
tttttttctgagatgggtct

SEQ ID NO: 13490 - DNA, 20 bp, synthetic construct
  misc_feature 1..20: note = Description of Artificial Sequence: Synthetic oligonucleotide
  misc_feature 1..20: note = Target: ANGPTL4; (-) strand; PAM type: YTN; PAM sequence: TTT
  source 1..20: mol_type = other DNA
ttttttttctgagatgggtc

SEQ ID NO: 13491 - DNA, 20 bp, synthetic construct
  misc_feature 1..20: note = Description of Artificial Sequence: Synthetic oligonucleotide
  misc_feature 1..20: note = Target: ANGPTL4; (-) strand; PAM type: YTN; PAM sequence: TTT
  source 1..20: mol_type = other DNA
tttttttttctgagatgggt

SEQ ID NO: 13492 - DNA, 20 bp, synthetic construct
  misc_feature 1..20: note = Description of Artificial Sequence: Synthetic oligonucleotide
  misc_feature 1..20: note = Target: ANGPTL4; (-) strand; PAM type: YTN; PAM sequence: TTT
  source 1..20: mol_type = other DNA
ttttttttttctgagatggg

SEQ ID NO: 13493 - DNA, 20 bp, synthetic construct
  misc_feature 1..20: note = Description of Artificial Sequence: Synthetic oligonucleotide
  misc_feature 1..20: note = Target: ANGPTL4; (-) strand; PAM type: YTN; PAM sequence: TTT
  source 1..20: mol_type = other DNA
tttttttttttctgagatgg

SEQ ID NO: 13494 - DNA, 20 bp, synthetic construct
  misc_feature 1..20: note = Description of Artificial Sequence: Synthetic oligonucleotide
  misc_feature 1..20: note = Target: ANGPTL4; (-) strand; PAM type: YTN; PAM sequence: TTT
  source 1..20: mol_type = other DNA
ttttttttttttctgagatg

SEQ ID NO: 13495 - DNA, 20 bp, synthetic construct
  misc_feature 1..20: note = Description of Artificial Sequence: Synthetic oligonucleotide
  misc_feature 1..20: note = Target: ANGPTL4; (-) strand; PAM type: YTN; PAM sequence: TTA
  source 1..20: mol_type = other DNA
tgtatttttttttttttttc

SEQ ID NO: 13496 - DNA, 20 bp, synthetic construct
  misc_feature 1..20: note = Description of Artificial Sequence: Synthetic oligonucleotide
  misc_feature 1..20: note = Target: ANGPTL4; (-) strand; PAM type: YTN; PAM sequence: TTT
  source 1..20: mol_type = other DNA
atgtattttttttttttttt

SEQ ID NO: 13497 - DNA, 20 bp, synthetic construct
  misc_feature 1..20: note = Description of Artificial Sequence: Synthetic oligonucleotide
  misc_feature 1..20: note = Target: ANGPTL4; (-) strand; PAM type: YTN; PAM sequence: TTT
  source 1..20: mol_type = other DNA
tatgtatttttttttttttt

SEQ ID NO: 13498 - DNA, 20 bp, synthetic construct
  misc_feature 1..20: note = Description of Artificial Sequence: Synthetic oligonucleotide
  misc_feature 1..20: note = Target: ANGPTL4; (-) strand; PAM type: YTN; PAM sequence: CTG
  source 1..20: mol_type = other DNA
ttttatgtattttttttttt

SEQ ID NO: 13499 - DNA, 20 bp, synthetic construct
  misc_feature 1..20: note = Description of Artificial Sequence: Synthetic oligonucleotide
  misc_feature 1..20: note = Target: ANGPTL4; (-) strand; PAM type: YTN; PAM sequence: TTA
  source 1..20: mol_type = other DNA
caggcatgagccaccacgcc

SEQ ID NO: 13500 - DNA, 20 bp, synthetic construct
  misc_feature 1..20: note = Description of Artificial Sequence: Synthetic oligonucleotide
  misc_feature 1..20: note = Target: ANGPTL4; (-) strand; PAM type: YTN; PAM sequence: CTA
  source 1..20: mol_type = other DNA
ggattacaggcatgagccac

SEQ ID NO: 13501 - DNA, 20 bp, synthetic construct
  misc_feature 1..20: note = Description of Artificial Sequence: Synthetic oligonucleotide
  misc_feature 1..20: note = Target: ANGPTL4; (-) strand; PAM type: YTN; PAM sequence: CTC
  source 1..20: mol_type = other DNA
ccaaagtgctaggattacag

SEQ ID NO: 13502 - DNA, 20 bp, synthetic construct
  misc_feature 1..20: note = Description of Artificial Sequence: Synthetic oligonucleotide
  misc_feature 1..20: note = Target: ANGPTL4; (-) strand; PAM type: YTN; PAM sequence: CTC
  source 1..20: mol_type = other DNA
agcctcccaaagtgctagga

SEQ ID NO: 13503 - DNA, 20 bp, synthetic construct
  misc_feature 1..20: note = Description of Artificial Sequence: Synthetic oligonucleotide
  misc_feature 1..20: note = Target: ANGPTL4; (-) strand; PAM type: YTN; PAM sequence: CTA
  source 1..20: mol_type = other DNA
tccaccacctcagcctccca

SEQ ID NO: 13504 - DNA, 20 bp, synthetic construct
  misc_feature 1..20: note = Description of Artificial Sequence: Synthetic oligonucleotide
  misc_feature 1..20: note = Target: ANGPTL4; (-) strand; PAM type: YTN; PAM sequence: TTA
  source 1..20: mol_type = other DNA
ggctatccaccacctcagcc

SEQ ID NO: 13505 - DNA, 20 bp, synthetic construct
  misc_feature 1..20: note = Description of Artificial Sequence: Synthetic oligonucleotide
  misc_feature 1..20: note = Target: ANGPTL4; (-) strand; PAM type: YTN; PAM sequence: CTT
  source 1..20: mol_type = other DNA
aggctatccaccacctcagc

SEQ ID NO: 13506 - DNA, 20 bp, synthetic construct
  misc_feature 1..20: note = Description of Artificial Sequence: Synthetic oligonucleotide
  misc_feature 1..20: note = Target: ANGPTL4; (-) strand; PAM type: YTN; PAM sequence: CTA
  source 1..20: mol_type = other DNA
agcttaggctatccaccacc

SEQ ID NO: 13507 - DNA, 20 bp, synthetic construct
  misc_feature 1..20: note = Description of Artificial Sequence: Synthetic oligonucleotide
  misc_feature 1..20: note = Target: ANGPTL4; (-) strand; PAM type: YTN; PAM sequence: CTC
  source 1..20: mol_type = other DNA
ctaagcttaggctatccacc

SEQ ID NO: 13508 - DNA, 20 bp, synthetic construct
  misc_feature 1..20: note = Description of Artificial Sequence: Synthetic oligonucleotide
  misc_feature 1..20: note = Target: ANGPTL4; (-) strand; PAM type: YTN; PAM sequence: CTC
  source 1..20: mol_type = other DNA
aaactcctaagcttaggcta

SEQ ID NO: 13509 - DNA, 20 bp, synthetic construct
  misc_feature 1..20: note = Description of Artificial Sequence: Synthetic oligonucleotide
  misc_feature 1..20: note = Target: ANGPTL4; (-) strand; PAM type: YTN; PAM sequence: CTG
  source 1..20: mol_type = other DNA
gtctcaaactcctaagctta

SEQ ID NO: 13510 - DNA, 20 bp, synthetic construct
  misc_feature 1..20: note = Description of Artificial Sequence: Synthetic oligonucleotide
  misc_feature 1..20: note = Target: ANGPTL4; (-) strand; PAM type: YTN; PAM sequence: TTG
  source 1..20: mol_type = other DNA
cccaggctggtctcaaactc

SEQ ID NO: 13511 - DNA, 20 bp, synthetic construct
  misc_feature 1..20: note = Description of Artificial Sequence: Synthetic oligonucleotide
  misc_feature 1..20: note = Target: ANGPTL4; (-) strand; PAM type: YTN; PAM sequence: TTC
  source 1..20: mol_type = other DNA
gccatgttgcccaggctggt

SEQ ID NO: 13512 - DNA, 20 bp, synthetic construct
  misc_feature 1..20: note = Description of Artificial Sequence: Synthetic oligonucleotide
  misc_feature 1..20: note = Target: ANGPTL4; (-) strand; PAM type: YTN; PAM sequence: TTT
  source 1..20: mol_type = other DNA
cgccatgttgcccaggctgg

SEQ ID NO: 13513 - DNA, 20 bp, synthetic construct
  misc_feature 1..20: note = Description of Artificial Sequence: Synthetic oligonucleotide
  misc_feature 1..20: note = Target: ANGPTL4; (-) strand; PAM type: YTN; PAM sequence: CTA
  source 1..20: mol_type = other DNA
gtagagggggtggggtttcg

SEQ ID NO: 13514 - DNA, 20 bp, synthetic construct
  misc_feature 1..20: note = Description of Artificial Sequence: Synthetic oligonucleotide
  misc_feature 1..20: note = Target: ANGPTL4; (-) strand; PAM type: YTN; PAM sequence: TTC
  source 1..20: mol_type = other DNA
tagtagagggggtggggttt

SEQ ID NO: 13515 - DNA, 20 bp, synthetic construct
  misc_feature 1..20: note = Description of Artificial Sequence: Synthetic oligonucleotide
  misc_feature 1..20: note = Target: ANGPTL4; (-) strand; PAM type: YTN; PAM sequence: TTG
  source 1..20: mol_type = other DNA
tattctagtagagggggtgg

SEQ ID NO: 13516 - DNA, 20 bp, synthetic construct
  misc_feature 1..20: note = Description of Artificial Sequence: Synthetic oligonucleotide
  misc_feature 1..20: note = Target: ANGPTL4; (-) strand; PAM type: YTN; PAM sequence: TTT
  source 1..20: mol_type = other DNA
gtattctagtagagggggtg

SEQ ID NO: 13517 - DNA, 20 bp, synthetic construct
  misc_feature 1..20: note = Description of Artificial Sequence: Synthetic oligonucleotide
  misc_feature 1..20: note = Target: ANGPTL4; (-) strand; PAM type: YTN; PAM sequence: TTT
  source 1..20: mol_type = other DNA
tgtattctagtagagggggt

SEQ ID NO: 13518 - DNA, 20 bp, synthetic construct
  misc_feature 1..20: note = Description of Artificial Sequence: Synthetic oligonucleotide
  misc_feature 1..20: note = Target: ANGPTL4; (-) strand; PAM type: YTN; PAM sequence: TTT
  source 1..20: mol_type = other DNA
ttgtattctagtagaggggg

SEQ ID NO: 13519 - DNA, 20 bp, synthetic construct
  misc_feature 1..20: note = Description of Artificial Sequence: Synthetic oligonucleotide
  misc_feature 1..20: note = Target: ANGPTL4; (-) strand; PAM type: YTN; PAM sequence: TTT
  source 1..20: mol_type = other DNA
tttgtattctagtagagggg

SEQ ID NO: 13520 - DNA, 20 bp, synthetic construct
  misc_feature 1..20: note = Description of Artificial Sequence: Synthetic oligonucleotide
  misc_feature 1..20: note = Target: ANGPTL4; (-) strand; PAM type: YTN; PAM sequence: CTA
  source 1..20: mol_type = other DNA
attttttgtattctagtaga

SEQ ID NO: 13521 - DNA, 20 bp, synthetic construct
  misc_feature 1..20: note = Description of Artificial Sequence: Synthetic oligonucleotide
  misc_feature 1..20: note = Target: ANGPTL4; (-) strand; PAM type: YTN; PAM sequence: CTA
  source 1..20: mol_type = other DNA
caggtgcccaccaccacgcc

SEQ ID NO: 13522 - DNA, 20 bp, synthetic construct
  misc_feature 1..20: note = Description of Artificial Sequence: Synthetic oligonucleotide
  misc_feature 1..20: note = Target: ANGPTL4; (-) strand; PAM type: YTN; PAM sequence: CTG
  source 1..20: mol_type = other DNA
ggactacaggtgcccaccac

SEQ ID NO: 13523 - DNA, 20 bp, synthetic construct
  misc_feature 1..20: note = Description of Artificial Sequence: Synthetic oligonucleotide
  misc_feature 1..20: note = Target: ANGPTL4; (-) strand; PAM type: YTN; PAM sequence: CTG
  source 1..20: mol_type = other DNA
agtagctgggactacaggtg

SEQ ID NO: 13524 - DNA, 20 bp, synthetic construct
  misc_feature 1..20: note = Description of Artificial Sequence: Synthetic oligonucleotide
  misc_feature 1..20: note = Target: ANGPTL4; (-) strand; PAM type: YTN; PAM sequence: CTC
  source 1..20: mol_type = other DNA
ctgagtagctgggactacag

SEQ ID NO: 13525 - DNA, 20 bp, synthetic construct
  misc_feature 1..20: note = Description of Artificial Sequence: Synthetic oligonucleotide
  misc_feature 1..20: note = Target: ANGPTL4; (-) strand; PAM type: YTN; PAM sequence: CTC
  source 1..20: mol_type = other DNA
agcctcctgagtagctggga

SEQ ID NO: 13526 - DNA, 20 bp, synthetic construct
  misc_feature 1..20: note = Description of Artificial Sequence: Synthetic oligonucleotide
  misc_feature 1..20: note = Target: ANGPTL4; (-) strand; PAM type: YTN; PAM sequence: CTG
  source 1..20: mol_type = other DNA
cctcagcctcctgagtagct

SEQ ID NO: 13527 - DNA, 20 bp, synthetic construct
  misc_feature 1..20: note = Description of Artificial Sequence: Synthetic oligonucleotide
  misc_feature 1..20: note = Target: ANGPTL4; (-) strand; PAM type: YTN; PAM sequence: CTC
  source 1..20: mol_type = other DNA
ctgcctcagcctcctgagta

SEQ ID NO: 13528 - DNA, 20 bp, synthetic construct
  misc_feature 1..20: note = Description of Artificial Sequence: Synthetic oligonucleotide
  misc_feature 1..20: note = Target: ANGPTL4; (-) strand; PAM type: YTN; PAM sequence: TTC
  source 1..20: mol_type = other DNA
tcctgcctcagcctcctgag

SEQ ID NO: 13529 - DNA, 20 bp, synthetic construct
  misc_feature 1..20: note = Description of Artificial Sequence: Synthetic oligonucleotide
  misc_feature 1..20: note = Target: ANGPTL4; (-) strand; PAM type: YTN; PAM sequence: TTC
  source 1..20: mol_type = other DNA
ccgccattctcctgcctcag

SEQ ID NO: 13530 - DNA, 20 bp, synthetic construct
  misc_feature 1..20: note = Description of Artificial Sequence: Synthetic oligonucleotide
  misc_feature 1..20: note = Target: ANGPTL4; (-) strand; PAM type: YTN; PAM sequence: CTC
  source 1..20: mol_type = other DNA
ccaggttcccgccattctcc

SEQ ID NO: 13531 - DNA, 20 bp, synthetic construct
  misc_feature 1..20: note = Description of Artificial Sequence: Synthetic oligonucleotide
  misc_feature 1..20: note = Target: ANGPTL4; (-) strand; PAM type: YTN; PAM sequence: CTC
  source 1..20: mol_type = other DNA
cacctcccaggttcccgcca

SEQ ID NO: 13532 - DNA, 20 bp, synthetic construct
  misc_feature 1..20: note = Description of Artificial Sequence: Synthetic oligonucleotide
  misc_feature 1..20: note = Target: ANGPTL4; (-) strand; PAM type: YTN; PAM sequence: CTG
  source 1..20: mol_type = other DNA
caagctccacctcccaggtt

SEQ ID NO: 13533 - DNA, 20 bp, synthetic construct
  misc_feature 1..20: note = Description of Artificial Sequence: Synthetic oligonucleotide
  misc_feature 1..20: note = Target: ANGPTL4; (-) strand; PAM type: YTN; PAM sequence: CTC
  source 1..20: mol_type = other DNA
actgcaagctccacctccca

SEQ ID NO: 13534 - DNA, 20 bp, synthetic construct
  misc_feature 1..20: note = Description of Artificial Sequence: Synthetic oligonucleotide
  misc_feature 1..20: note = Target: ANGPTL4; (-) strand; PAM type: YTN; PAM sequence: CTC
  source 1..20: mol_type = other DNA
ggctcactgcaagctccacc

SEQ ID NO: 13535 - DNA, 20 bp, synthetic construct
  misc_feature 1..20: note = Description of Artificial Sequence: Synthetic oligonucleotide
  misc_feature 1..20: note = Target: ANGPTL4; (-) strand; PAM type: YTN; PAM sequence: CTC
  source 1..20: mol_type = other DNA
atctcggctcactgcaagct

SEQ ID NO: 13536 - DNA, 20 bp, synthetic construct
  misc_feature 1..20: note = Description of Artificial Sequence: Synthetic oligonucleotide
  misc_feature 1..20: note = Target: ANGPTL4; (-) strand; PAM type: YTN; PAM sequence: CTG
  source 1..20: mol_type = other DNA
gagtgcagtggcctcatctc

SEQ ID NO: 13537 - DNA, 20 bp, synthetic construct
  misc_feature 1..20: note = Description of Artificial Sequence: Synthetic oligonucleotide
  misc_feature 1..20: note = Target: ANGPTL4; (-) strand; PAM type: YTN; PAM sequence: TTG
  source 1..20: mol_type = other DNA
cccaggctggagtgcagtgg

SEQ ID NO: 13538 - DNA, 20 bp, synthetic construct
  misc_feature 1..20: note = Description of Artificial Sequence: Synthetic oligonucleotide
  misc_feature 1..20: note = Target: ANGPTL4; (-) strand; PAM type: YTN; PAM sequence: CTG
  source 1..20: mol_type = other DNA
ttgcccaggctggagtgcag

SEQ ID NO: 13539 - DNA, 20 bp, synthetic construct
  misc_feature 1..20: note = Description of Artificial Sequence: Synthetic oligonucleotide
  misc_feature 1..20: note = Target: ANGPTL4; (-) strand; PAM type: YTN; PAM sequence: CTC
  source 1..20: mol_type = other DNA
tgttgcccaggctggagtgc

SEQ ID NO: 13540 - DNA, 20 bp, synthetic construct
  misc_feature 1..20: note = Description of Artificial Sequence: Synthetic oligonucleotide
  misc_feature 1..20: note = Target: ANGPTL4; (-) strand; PAM type: YTN; PAM sequence: TTG
  source 1..20: mol_type = other DNA
ctctgttgcccaggctggag

SEQ ID NO: 13541 - DNA, 20 bp, synthetic construct
  misc_feature 1..20: note = Description of Artificial Sequence: Synthetic oligonucleotide
  misc_feature 1..20: note = Target: ANGPTL4; (-) strand; PAM type: YTN; PAM sequence: CTT
  source 1..20: mol_type = other DNA
gctctgttgcccaggctgga

SEQ ID NO: 13542 - DNA, 20 bp, synthetic construct
  misc_feature 1..20: note = Description of Artificial Sequence: Synthetic oligonucleotide
  misc_feature 1..20: note = Target: ANGPTL4; (-) strand; PAM type: YTN; PAM sequence: TTG
  source 1..20: mol_type = other DNA
agacagagtcttgctctgtt

SEQ ID NO: 13543 - DNA, 20 bp, synthetic construct
  misc_feature 1..20: note = Description of Artificial Sequence: Synthetic oligonucleotide
  misc_feature 1..20: note = Target: ANGPTL4; (-) strand; PAM type: YTN; PAM sequence: TTT
  source 1..20: mol_type = other DNA
gagacagagtcttgctctgt

SEQ ID NO: 13544 - DNA, 20 bp, synthetic construct
  misc_feature 1..20: note = Description of Artificial Sequence: Synthetic oligonucleotide
  misc_feature 1..20: note = Target: ANGPTL4; (-) strand; PAM type: YTN; PAM sequence: TTT
  source 1..20: mol_type = other DNA
tgagacagagtcttgctctg

SEQ ID NO: 13545 - DNA, 20 bp, synthetic construct
  misc_feature 1..20: note = Description of Artificial Sequence: Synthetic oligonucleotide
  misc_feature 1..20: note = Target: ANGPTL4; (-) strand; PAM type: YTN; PAM sequence: TTT
  source 1..20: mol_type = other DNA
ttgagacagagtcttgctct

SEQ ID NO: 13546 - DNA, 20 bp, synthetic construct
  misc_feature 1..20: note = Description of Artificial Sequence: Synthetic oligonucleotide
  misc_feature 1..20: note = Target: ANGPTL4; (-) strand; PAM type: YTN; PAM sequence: TTT
  source 1..20: mol_type = other DNA
tttgagacagagtcttgctc

SEQ ID NO: 13547 - DNA, 20 bp, synthetic construct
  misc_feature 1..20: note = Description of Artificial Sequence: Synthetic oligonucleotide
  misc_feature 1..20: note = Target: ANGPTL4; (-) strand; PAM type: YTN; PAM sequence: TTT
  source 1..20: mol_type = other DNA
ttttgagacagagtcttgct

SEQ ID NO: 13548 - DNA, 20 bp, synthetic construct
  misc_feature 1..20: note = Description of Artificial Sequence: Synthetic oligonucleotide
  misc_feature 1..20: note = Target: ANGPTL4; (-) strand; PAM type: YTN; PAM sequence: TTT
  source 1..20: mol_type = other DNA
tttttgagacagagtcttgc

SEQ ID NO: 13549 - DNA, 20 bp, synthetic construct
  misc_feature 1..20: note = Description of Artificial Sequence: Synthetic oligonucleotide
  misc_feature 1..20: note = Target: ANGPTL4; (-) strand; PAM type: YTN; PAM sequence: TTT
  source 1..20: mol_type = other DNA
ttttttgagacagagtcttg

SEQ ID NO: 13550 - DNA, 20 bp, synthetic construct
  misc_feature 1..20: note = Description of Artificial Sequence: Synthetic oligonucleotide
  misc_feature 1..20: note = Target: ANGPTL4; (-) strand; PAM type: YTN; PAM sequence: TTT
  source 1..20: mol_type = other DNA
tttttttgagacagagtctt

SEQ ID NO: 13551 - DNA, 20 bp, synthetic construct
  misc_feature 1..20: note = Description of Artificial Sequence: Synthetic oligonucleotide
  misc_feature 1..20: note = Target: ANGPTL4; (-) strand; PAM type: YTN; PAM sequence: TTT
  source 1..20: mol_type = other DNA
ttttttttgagacagagtct

SEQ ID NO: 13552 - DNA, 20 bp, synthetic construct
  misc_feature 1..20: note = Description of Artificial Sequence: Synthetic oligonucleotide
  misc_feature 1..20: note = Target: ANGPTL4; (-) strand; PAM type: YTN; PAM sequence: TTT
  source 1..20: mol_type = other DNA
tttttttttgagacagagtc

SEQ ID NO: 13553 - DNA, 20 bp, synthetic construct
  misc_feature 1..20: note = Description of Artificial Sequence: Synthetic oligonucleotide
  misc_feature 1..20: note = Target: ANGPTL4; (-) strand; PAM type: YTN; PAM sequence: TTT
  source 1..20: mol_type = other DNA
ttttttttttgagacagagt

SEQ ID NO: 13554 - DNA, 20 bp, synthetic construct
  misc_feature 1..20: note = Description of Artificial Sequence: Synthetic oligonucleotide
  misc_feature 1..20: note = Target: ANGPTL4; (-) strand; PAM type: YTN; PAM sequence: TTT
  source 1..20: mol_type = other DNA
tttttttttttgagacagag

SEQ ID NO: 13555 - DNA, 20 bp, synthetic construct
  misc_feature 1..20: note = Description of Artificial Sequence: Synthetic oligonucleotide
  misc_feature 1..20: note = Target: ANGPTL4; (-) strand; PAM type: YTN; PAM sequence: TTT
  source 1..20: mol_type = other DNA
ttttttttttttgagacaga

SEQ ID NO: 13556 - DNA, 20 bp, synthetic construct
  misc_feature 1..20: note = Description of Artificial Sequence: Synthetic oligonucleotide
  misc_feature 1..20: note = Target: ANGPTL4; (-) strand; PAM type: YTN; PAM sequence: TTT
  source 1..20: mol_type = other DNA
tttttttttttttgagacag

SEQ ID NO: 13557 - DNA, 20 bp, synthetic construct
  misc_feature 1..20: note = Description of Artificial Sequence: Synthetic oligonucleotide
  misc_feature 1..20: note = Target: ANGPTL4; (-) strand; PAM type: YTN; PAM sequence: TTT
  source 1..20: mol_type = other DNA
ttttttttttttttgagaca

SEQ ID NO: 13558 - DNA, 20 bp, synthetic construct
  misc_feature 1..20: note = Description of Artificial Sequence: Synthetic oligonucleotide
  misc_feature 1..20: note = Target: ANGPTL4; (-) strand; PAM type: YTN; PAM sequence: TTT
  source 1..20: mol_type = other DNA
tttttttttttttttgagac

SEQ ID NO: 13559 - DNA, 20 bp, synthetic construct
  misc_feature 1..20: note = Description of Artificial Sequence: Synthetic oligonucleotide
  misc_feature 1..20: note = Target: ANGPTL4; (-) strand; PAM type: YTN; PAM sequence: TTT
  source 1..20: mol_type = other DNA
ttttttttttttttttgaga

SEQ ID NO: 13560 - DNA, 20 bp, synthetic construct
  misc_feature 1..20: note = Description of Artificial Sequence: Synthetic oligonucleotide
  misc_feature 1..20: note = Target: ANGPTL4; (-) strand; PAM type: YTN; PAM sequence: TTT
  source 1..20: mol_type = other DNA
tttttttttttttttttgag

SEQ ID NO: 13561 - DNA, 20 bp, synthetic construct
  misc_feature 1..20: note = Description of Artificial Sequence: Synthetic oligonucleotide
  misc_feature 1..20: note = Target: ANGPTL4; (-) strand; PAM type: YTN; PAM sequence: CTT
  source 1..20: mol_type = other DNA
ttttttttttttttttttga

SEQ ID NO: 13562 - DNA, 20 bp, synthetic construct
  misc_feature 1..20: note = Description of Artificial Sequence: Synthetic oligonucleotide
  misc_feature 1..20: note = Target: ANGPTL4; (-) strand; PAM type: YTN; PAM sequence: CTA
  source 1..20: mol_type = other DNA
gccttttttttttttttttt

SEQ ID NO: 13563 - DNA, 20 bp, synthetic construct
  misc_feature 1..20: note = Description of Artificial Sequence: Synthetic oligonucleotide
  misc_feature 1..20: note = Target: ANGPTL4; (-) strand; PAM type: YTN; PAM sequence: CTG
  source 1..20: mol_type = other DNA
gcctagcctttttttttttt

SEQ ID NO: 13564 - DNA, 20 bp, synthetic construct
  misc_feature 1..20: note = Description of Artificial Sequence: Synthetic oligonucleotide
  misc_feature 1..20: note = Target: ANGPTL4; (-) strand; PAM type: YTN; PAM sequence: CTG
  source 1..20: mol_type = other DNA
tgcctggcctagcctttttt

SEQ ID NO: 13565 - DNA, 20 bp, synthetic construct
  misc_feature 1..20: note = Description of Artificial Sequence: Synthetic oligonucleotide
  misc_feature 1..20: note = Target: ANGPTL4; (-) strand; PAM type: YTN; PAM sequence: TTA
  source 1..20: mol_type = other DNA
caggtgtgagccactgtgcc

SEQ ID NO: 13566 - DNA, 20 bp, synthetic construct
  misc_feature 1..20: note = Description of Artificial Sequence: Synthetic oligonucleotide
  misc_feature 1..20: note = Target: ANGPTL4; (-) strand; PAM type: YTN; PAM sequence: CTG
  source 1..20: mol_type = other DNA
ggattacaggtgtgagccac

SEQ ID NO: 13567 - DNA, 20 bp, synthetic construct
  misc_feature 1..20: note = Description of Artificial Sequence: Synthetic oligonucleotide
  misc_feature 1..20: note = Target: ANGPTL4; (-) strand; PAM type: YTN; PAM sequence: CTC
  source 1..20: mol_type = other DNA
ccaacgtgctgggattacag

SEQ ID NO: 13568 - DNA, 20 bp, synthetic construct
  misc_feature 1..20: note = Description of Artificial Sequence: Synthetic oligonucleotide
  misc_feature 1..20: note = Target: ANGPTL4; (-) strand; PAM type: YTN; PAM sequence: CTC
  source 1..20: mol_type = other DNA
ggcctcccaacgtgctggga

SEQ ID NO: 13569 - DNA, 20 bp, synthetic construct
  misc_feature 1..20: note = Description of Artificial Sequence: Synthetic oligonucleotide
  misc_feature 1..20: note = Target: ANGPTL4; (-) strand; PAM type: YTN; PAM sequence: CTG
  source 1..20: mol_type = other DNA
tctcggcctcccaacgtgct

SEQ ID NO: 13570 - DNA, 20 bp, synthetic construct
  misc_feature 1..20: note = Description of Artificial Sequence: Synthetic oligonucleotide
  misc_feature 1..20: note = Target: ANGPTL4; (-) strand; PAM type: YTN; PAM sequence: CTC
  source 1..20: mol_type = other DNA
aggtgatccacctgtctcgg

SEQ ID NO: 13571 - DNA, 20 bp, synthetic construct
  misc_feature 1..20: note = Description of Artificial Sequence: Synthetic oligonucleotide
  misc_feature 1..20: note = Target: ANGPTL4; (-) strand; PAM type: YTN; PAM sequence: CTG
  source 1..20: mol_type = other DNA
acctcaggtgatccacctgt

SEQ ID NO: 13572 - DNA, 20 bp, synthetic construct
  misc_feature 1..20: note = Description of Artificial Sequence: Synthetic oligonucleotide
  misc_feature 1..20: note = Target: ANGPTL4; (-) strand; PAM type: YTN; PAM sequence: TTC
  source 1..20: mol_type = other DNA
ctgacctcaggtgatccacc

SEQ ID NO: 13573 - DNA, 20 bp, synthetic construct
  misc_feature 1..20: note = Description of Artificial Sequence: Synthetic oligonucleotide
  misc_feature 1..20: note = Target: ANGPTL4; (-) strand; PAM type: YTN; PAM sequence: CTC
  source 1..20: mol_type = other DNA
aaattcctgacctcaggtga

SEQ ID NO: 13574 - DNA, 20 bp, synthetic construct
  misc_feature 1..20: note = Description of Artificial Sequence: Synthetic oligonucleotide
  misc_feature 1..20: note = Target: ANGPTL4; (-) strand; PAM type: YTN; PAM sequence: CTG
  source 1..20: mol_type = other DNA
gtctcaaattcctgacctca

SEQ ID NO: 13575 - DNA, 20 bp, synthetic construct
  misc_feature 1..20: note = Description of Artificial Sequence: Synthetic oligonucleotide
  misc_feature 1..20: note = Target: ANGPTL4; (-) strand; PAM type: YTN; PAM sequence: CTG
  source 1..20: mol_type = other DNA
ctggtctcaaattcctgacc

SEQ ID NO: 13576 - DNA, 20 bp, synthetic construct
  misc_feature 1..20: note = Description of Artificial Sequence: Synthetic oligonucleotide
  misc_feature 1..20: note = Target: ANGPTL4; (-) strand; PAM type: YTN; PAM sequence: CTC
  source 1..20: mol_type = other DNA
tgctggtctcaaattcctga

SEQ ID NO: 13577 - DNA, 20 bp, synthetic construct
  misc_feature 1..20: note = Description of Artificial Sequence: Synthetic oligonucleotide
  misc_feature 1..20: note = Target: ANGPTL4; (-) strand; PAM type: YTN; PAM sequence: TTG
  source 1..20: mol_type = other DNA
gctctgctggtctcaaattc

SEQ ID NO: 13578 - DNA, 20 bp, synthetic construct
  misc_feature 1..20: note = Description of Artificial Sequence: Synthetic oligonucleotide
  misc_feature 1..20: note = Target: ANGPTL4; (-) strand; PAM type: YTN; PAM sequence: CTA
  source 1..20: mol_type = other DNA
tgttggctctgctggtctca

SEQ ID NO: 13579 - DNA, 20 bp, synthetic construct
  misc_feature 1..20: note = Description of Artificial Sequence: Synthetic oligonucleotide
  misc_feature 1..20: note = Target: ANGPTL4; (-) strand; PAM type: YTN; PAM sequence: TTC
  source 1..20: mol_type = other DNA
actatgttggctctgctggt

SEQ ID NO: 13580 - DNA, 20 bp, synthetic construct
  misc_feature 1..20: note = Description of Artificial Sequence: Synthetic oligonucleotide
  misc_feature 1..20: note = Target: ANGPTL4; (-) strand; PAM type: YTN; PAM sequence: TTT
  source 1..20: mol_type = other DNA
cactatgttggctctgctgg

SEQ ID NO: 13581 - DNA, 20 bp, synthetic construct
  misc_feature 1..20: note = Description of Artificial Sequence: Synthetic oligonucleotide
  misc_feature 1..20: note = Target: ANGPTL4; (-) strand; PAM type: YTN; PAM sequence: TTA
  source 1..20: mol_type = other DNA
gtgcaaacggggtttcacta

SEQ ID NO: 13582 - DNA, 20 bp, synthetic construct
  misc_feature 1..20: note = Description of Artificial Sequence: Synthetic oligonucleotide
  misc_feature 1..20: note = Target: ANGPTL4; (-) strand; PAM type: YTN; PAM sequence: TTT
  source 1..20: mol_type = other DNA
agtgcaaacggggtttcact

SEQ ID NO: 13583 - DNA, 20 bp, synthetic construct
  misc_feature 1..20: note = Description of Artificial Sequence: Synthetic oligonucleotide
  misc_feature 1..20: note = Target: ANGPTL4; (-) strand; PAM type: YTN; PAM sequence: TTT
  source 1..20: mol_type = other DNA
tagtgcaaacggggtttcac

SEQ ID NO: 13584 - DNA, 20 bp, synthetic construct
  misc_feature 1..20: note = Description of Artificial Sequence: Synthetic oligonucleotide
  misc_feature 1..20: note = Target: ANGPTL4; (-) strand; PAM type: YTN; PAM sequence: TTT
  source 1..20: mol_type = other DNA
ttagtgcaaacggggtttca

SEQ ID NO: 13585 - DNA, 20 bp, synthetic construct
  misc_feature 1..20: note = Description of Artificial Sequence: Synthetic oligonucleotide
  misc_feature 1..20: note = Target: ANGPTL4; (-) strand; PAM type: YTN; PAM sequence: TTG
  source 1..20: mol_type = other DNA
tatttttagtgcaaacgggg

SEQ ID NO: 13586 - DNA, 20 bp, synthetic construct
  misc_feature 1..20: note = Description of Artificial Sequence: Synthetic oligonucleotide
  misc_feature 1..20: note = Target: ANGPTL4; (-) strand; PAM type: YTN; PAM sequence: TTT
  source 1..20: mol_type = other DNA
gtatttttagtgcaaacggg

SEQ ID NO: 13587 - DNA, 20 bp, synthetic construct
  misc_feature 1..20: note = Description of Artificial Sequence: Synthetic oligonucleotide
  misc_feature 1..20: note = Target: ANGPTL4; (-) strand; PAM type: YTN; PAM sequence: TTT
  source 1..20: mol_type = other DNA
tgtatttttagtgcaaacgg

SEQ ID NO: 13588 - DNA, 20 bp, synthetic construct
  misc_feature 1..20: note = Description of Artificial Sequence: Synthetic oligonucleotide
  misc_feature 1..20: note = Target: ANGPTL4; (-) strand; PAM type: YTN; PAM sequence: TTT
  source 1..20: mol_type = other DNA
ttgtatttttagtgcaaacg

SEQ ID NO: 13589 - DNA, 20 bp, synthetic construct
  misc_feature 1..20: note = Description of Artificial Sequence: Synthetic oligonucleotide
  misc_feature 1..20: note = Target: ANGPTL4; (-) strand; PAM type: YTN; PAM sequence: TTT
  source 1..20: mol_type = other DNA
tttgtatttttagtgcaaac

SEQ ID NO: 13590 - DNA, 20 bp, synthetic construct
  misc_feature 1..20: note = Description of Artificial Sequence: Synthetic oligonucleotide
  misc_feature 1..20: note = Target: ANGPTL4; (-) strand; PAM type: YTN; PAM sequence: CTA
  source 1..20: mol_type = other DNA
attttttgtatttttagtgc

SEQ ID NO: 13591 - DNA, 20 bp, synthetic construct
  misc_feature 1..20: note = Description of Artificial Sequence: Synthetic oligonucleotide
  misc_feature 1..20: note = Target: ANGPTL4; (-) strand; PAM type: YTN; PAM sequence: CTG
  source 1..20: mol_type = other DNA
actaattttttgtattttta

SEQ ID NO: 13592 - DNA, 20 bp, synthetic construct
  misc_feature 1..20: note = Description of Artificial Sequence: Synthetic oligonucleotide
  misc_feature 1..20: note = Target: ANGPTL4; (-) strand; PAM type: YTN; PAM sequence: TTA
  source 1..20: mol_type = other DNA
caggtgtgcaccaccacacc

SEQ ID NO: 13593 - DNA, 20 bp, synthetic construct
  misc_feature 1..20: note = Description of Artificial Sequence: Synthetic oligonucleotide
  misc_feature 1..20: note = Target: ANGPTL4; (-) strand; PAM type: YTN; PAM sequence: CTC
  source 1..20: mol_type = other DNA
ccgagtagcggggattacag

SEQ ID NO: 13594 - DNA, 20 bp, synthetic construct
  misc_feature 1..20: note = Description of Artificial Sequence: Synthetic oligonucleotide
  misc_feature 1..20: note = Target: ANGPTL4; (-) strand; PAM type: YTN; PAM sequence: CTC
  source 1..20: mol_type = other DNA
agcctcccgagtagcgggga

SEQ ID NO: 13595 - DNA, 20 bp, synthetic construct
  misc_feature 1..20: note = Description of Artificial Sequence: Synthetic oligonucleotide
  misc_feature 1..20: note = Target: ANGPTL4; (-) strand; PAM type: YTN; PAM sequence: CTC
  source 1..20: mol_type = other DNA
cagcctcagcctcccgagta

SEQ ID NO: 13596 - DNA, 20 bp, synthetic construct
  misc_feature 1..20: note = Description of Artificial Sequence: Synthetic oligonucleotide
  misc_feature 1..20: note = Target: ANGPTL4; (-) strand; PAM type: YTN; PAM sequence: TTC
  source 1..20: mol_type = other DNA
tccagcctcagcctcccgag

SEQ ID NO: 13597 - DNA, 20 bp, synthetic construct
  misc_feature 1..20: note = Description of Artificial Sequence: Synthetic oligonucleotide
  misc_feature 1..20: note = Target: ANGPTL4; (-) strand; PAM type: YTN; PAM sequence: TTC
  source 1..20: mol_type = other DNA
aagcgattctccagcctcag

SEQ ID NO: 13598 - DNA, 20 bp, synthetic construct
  misc_feature 1..20: note = Description of Artificial Sequence: Synthetic oligonucleotide
  misc_feature 1..20: note = Target: ANGPTL4; (-) strand; PAM type: YTN; PAM sequence: CTC
  source 1..20: mol_type = other DNA
ccaggttcaagcgattctcc

SEQ ID NO: 13599 - DNA, 20 bp, synthetic construct
  misc_feature 1..20: note = Description of Artificial Sequence: Synthetic oligonucleotide
  misc_feature 1..20: note = Target: ANGPTL4; (-) strand; PAM type: YTN; PAM sequence: CTG
  source 1..20: mol_type = other DNA
cctcccaggttcaagcgatt

SEQ ID NO: 13600 - DNA, 20 bp, synthetic construct
  misc_feature 1..20: note = Description of Artificial Sequence: Synthetic oligonucleotide
  misc_feature 1..20: note = Target: ANGPTL4; (-) strand; PAM type: YTN; PAM sequence: CTC
  source 1..20: mol_type = other DNA
tgcctcccaggttcaagcga

SEQ ID NO: 13601 - DNA, 20 bp, synthetic construct
  misc_feature 1..20: note = Description of Artificial Sequence: Synthetic oligonucleotide
  misc_feature 1..20: note = Target: ANGPTL4; (-) strand; PAM type: YTN; PAM sequence: CTG
  source 1..20: mol_type = other DNA
caacctctgcctcccaggtt

SEQ ID NO: 13602 - DNA, 20 bp, synthetic construct
  misc_feature 1..20: note = Description of Artificial Sequence: Synthetic oligonucleotide
  misc_feature 1..20: note = Target: ANGPTL4; (-) strand; PAM type: YTN; PAM sequence: CTC
  source 1..20: mol_type = other DNA
actgcaacctctgcctccca

SEQ ID NO: 13603 - DNA, 20 bp, synthetic construct
  misc_feature 1..20: note = Description of Artificial Sequence: Synthetic oligonucleotide
  misc_feature 1..20: note = Target: ANGPTL4; (-) strand; PAM type: YTN; PAM sequence: CTC
  source 1..20: mol_type = other DNA
cgctcactgcaacctctgcc

SEQ ID NO: 13604 - DNA, 20 bp, synthetic construct
  misc_feature 1..20: note = Description of Artificial Sequence: Synthetic oligonucleotide
  misc_feature 1..20: note = Target: ANGPTL4; (-) strand; PAM type: YTN; PAM sequence: CTG
  source 1..20: mol_type = other DNA
gagtgcaacggcgcaatctc

SEQ ID NO: 13605 - DNA, 20 bp, synthetic construct
  misc_feature 1..20: note = Description of Artificial Sequence: Synthetic oligonucleotide
  misc_feature 1..20: note = Target: ANGPTL4; (-) strand; PAM type: YTN; PAM sequence: TTG
  source 1..20: mol_type = other DNA
tcgcccaggctggagtgcaa

SEQ ID NO: 13606 - DNA, 20 bp, synthetic construct
  misc_feature 1..20: note = Description of Artificial Sequence: Synthetic oligonucleotide
  misc_feature 1..20: note = Target: ANGPTL4; (-) strand; PAM type: YTN; PAM sequence: CTT
  source 1..20: mol_type = other DNA
gtcgcccaggctggagtgca

SEQ ID NO: 13607 - DNA, 20 bp, synthetic construct
  misc_feature 1..20: note = Description of Artificial Sequence: Synthetic oligonucleotide
  misc_feature 1..20: note = Target: ANGPTL4; (-) strand; PAM type: YTN; PAM sequence: CTC
  source 1..20: mol_type = other DNA
ttgtcgcccaggctggagtg

SEQ ID NO: 13608 - DNA, 20 bp, synthetic construct
  misc_feature 1..20: note = Description of Artificial Sequence: Synthetic oligonucleotide
  misc_feature 1..20: note = Target: ANGPTL4; (-) strand; PAM type: YTN; PAM sequence: TTC
  source 1..20: mol_type = other DNA
cctcttgtcgcccaggctgg

SEQ ID NO: 13609 - DNA, 20 bp, synthetic construct
  misc_feature 1..20: note = Description of Artificial Sequence: Synthetic oligonucleotide
  misc_feature 1..20: note = Target: ANGPTL4; (-) strand; PAM type: YTN; PAM sequence: TTT
  source 1..20: mol_type = other DNA
ccctcttgtcgcccaggctg

SEQ ID NO: 13610 - DNA, 20 bp, synthetic construct
  misc_feature 1..20: note = Description of Artificial Sequence: Synthetic oligonucleotide
  misc_feature 1..20: note = Target: ANGPTL4; (-) strand; PAM type: YTN; PAM sequence: TTG
  source 1..20: mol_type = other DNA
agatggagtttccctcttgt

SEQ ID NO: 13611 - DNA, 20 bp, synthetic construct
  misc_feature 1..20: note = Description of Artificial Sequence: Synthetic oligonucleotide
  misc_feature 1..20: note = Target: ANGPTL4; (-) strand; PAM type: YTN; PAM sequence: TTT
  source 1..20: mol_type = other DNA
gagatggagtttccctcttg

SEQ ID NO: 13612 - DNA, 20 bp, synthetic construct
  misc_feature 1..20: note = Description of Artificial Sequence: Synthetic oligonucleotide
  misc_feature 1..20: note = Target: ANGPTL4; (-) strand; PAM type: YTN; PAM sequence: TTT
  source 1..20: mol_type = other DNA
tgagatggagtttccctctt

SEQ ID NO: 13613 - DNA, 20 bp, synthetic construct
  misc_feature 1..20: note = Description of Artificial Sequence: Synthetic oligonucleotide
  misc_feature 1..20: note = Target: ANGPTL4; (-) strand; PAM type: YTN; PAM sequence: TTT
  source 1..20: mol_type = other DNA
ttgagatggagtttccctct

SEQ ID NO: 13614 - DNA, 20 bp, synthetic construct
  misc_feature 1..20: note = Description of Artificial Sequence: Synthetic oligonucleotide
  misc_feature 1..20: note = Target: ANGPTL4; (-) strand; PAM type: YTN; PAM sequence: TTT
  source 1..20: mol_type = other DNA
tttgagatggagtttccctc

SEQ ID NO: 13615 - DNA, 20 bp, synthetic construct
  misc_feature 1..20: note = Description of Artificial Sequence: Synthetic oligonucleotide
  misc_feature 1..20: note = Target: ANGPTL4; (-) strand; PAM type: YTN; PAM sequence: TTT
  source 1..20: mol_type = other DNA
ttttgagatggagtttccct

SEQ ID NO: 13616 - DNA, 20 bp, synthetic construct
  misc_feature 1..20: note = Description of Artificial Sequence: Synthetic oligonucleotide
  misc_feature 1..20: note = Target: ANGPTL4; (-) strand; PAM type: YTN; PAM sequence: TTA
  source 1..20: mol_type = other DNA
tttttttgagatggagtttc

SEQ ID NO: 13617 - DNA, 20 bp, synthetic construct
  misc_feature 1..20: note = Description of Artificial Sequence: Synthetic oligonucleotide
  misc_feature 1..20: note = Target: ANGPTL4; (-) strand; PAM type: YTN; PAM sequence: TTT
  source 1..20: mol_type = other DNA
atttttttgagatggagttt

SEQ ID NO: 13618 - DNA, 20 bp, synthetic construct
  misc_feature 1..20: note = Description of Artificial Sequence: Synthetic oligonucleotide
  misc_feature 1..20: note = Target: ANGPTL4; (-) strand; PAM type: YTN; PAM sequence: TTA
  source 1..20: mol_type = other DNA
tttatttttttgagatggag

SEQ ID NO: 13619 - DNA, 20 bp, synthetic construct
  misc_feature 1..20: note = Description of Artificial Sequence: Synthetic oligonucleotide
  misc_feature 1..20: note = Target: ANGPTL4; (-) strand; PAM type: YTN; PAM sequence: TTT
  source 1..20: mol_type = other DNA
atttatttttttgagatgga

SEQ ID NO: 13620 - DNA, 20 bp, synthetic construct
  misc_feature 1..20: note = Description of Artificial Sequence: Synthetic oligonucleotide
  misc_feature 1..20: note = Target: ANGPTL4; (-) strand; PAM type: YTN; PAM sequence: TTA
  source 1..20: mol_type = other DNA
tttatttatttttttgagat

SEQ ID NO: 13621 - DNA, 20 bp, synthetic construct
  misc_feature 1..20: note = Description of Artificial Sequence: Synthetic oligonucleotide
  misc_feature 1..20: note = Target: ANGPTL4; (-) strand; PAM type: YTN; PAM sequence: TTT
  source 1..20: mol_type = other DNA
atttatttatttttttgaga

SEQ ID NO: 13622 - DNA, 20 bp, synthetic construct
  misc_feature 1..20: note = Description of Artificial Sequence: Synthetic oligonucleotide
  misc_feature 1..20: note = Target: ANGPTL4; (-) strand; PAM type: YTN; PAM sequence: TTT
  source 1..20: mol_type = other DNA
tatttatttatttttttgag

SEQ ID NO: 13623 - DNA, 20 bp, synthetic construct
  misc_feature 1..20: note = Description of Artificial Sequence: Synthetic oligonucleotide
  misc_feature 1..20: note = Target: ANGPTL4; (-) strand; PAM type: YTN; PAM sequence: TTA
  source 1..20: mol_type = other DNA
ttttatttatttattttttt

SEQ ID NO: 13624 - DNA, 20 bp, synthetic construct
  misc_feature 1..20: note = Description of Artificial Sequence: Synthetic oligonucleotide
  misc_feature 1..20: note = Target: ANGPTL4; (-) strand; PAM type: YTN; PAM sequence: TTT
  source 1..20: mol_type = other DNA
attttatttatttatttttt

SEQ ID NO: 13625 - DNA, 20 bp, synthetic construct
  misc_feature 1..20: note = Description of Artificial Sequence: Synthetic oligonucleotide
  misc_feature 1..20: note = Target: ANGPTL4; (-) strand; PAM type: YTN; PAM sequence: TTT
  source 1..20: mol_type = other DNA
tattttatttatttattttt

SEQ ID NO: 13626 - DNA, 20 bp, synthetic construct
  misc_feature 1..20: note = Description of Artificial Sequence: Synthetic oligonucleotide
  misc_feature 1..20: note = Target: ANGPTL4; (-) strand; PAM type: YTN; PAM sequence: TTT
  source 1..20: mol_type = other DNA
ttattttatttatttatttt

SEQ ID NO: 13627 - DNA, 20 bp, synthetic construct
  misc_feature 1..20: note = Description of Artificial Sequence: Synthetic oligonucleotide
  misc_feature 1..20: note = Target: ANGPTL4; (-) strand; PAM type: YTN; PAM sequence: TTT
  source 1..20: mol_type = other DNA
tttattttatttatttattt

SEQ ID NO: 13628 - DNA, 20 bp, synthetic construct
  misc_feature 1..20: note = Description of Artificial Sequence: Synthetic oligonucleotide
  misc_feature 1..20: note = Target: ANGPTL4; (-) strand; PAM type: YTN; PAM sequence: CTA
  source 1..20: mol_type = other DNA
ttttttattttatttattta

SEQ ID NO: 13629 - DNA, 20 bp, synthetic construct
  misc_feature 1..20: note = Description of Artificial Sequence: Synthetic oligonucleotide
  misc_feature 1..20: note = Target: ANGPTL4; (-) strand; PAM type: YTN; PAM sequence: TTA
  source 1..20: mol_type = other DNA
caggcatgagccaccgcgcc

SEQ ID NO: 13630 - DNA, 20 bp, synthetic construct
  misc_feature 1..20: note = Description of Artificial Sequence: Synthetic oligonucleotide
  misc_feature 1..20: note = Target: ANGPTL4; (-) strand; PAM type: YTN; PAM sequence: CTG
  source 1..20: mol_type = other DNA
ggattacaggcatgagccac

SEQ ID NO: 13631 - DNA, 20 bp, synthetic construct
  misc_feature 1..20: note = Description of Artificial Sequence: Synthetic oligonucleotide
  misc_feature 1..20: note = Target: ANGPTL4; (-) strand; PAM type: YTN; PAM sequence: CTC
  source 1..20: mol_type = other DNA
ccaaagtgctgggattacag

SEQ ID NO: 13632 - DNA, 20 bp, synthetic construct
  misc_feature 1..20: note = Description of Artificial Sequence: Synthetic oligonucleotide
  misc_feature 1..20: note = Target: ANGPTL4; (-) strand; PAM type: YTN; PAM sequence: TTC
  source 1..20: mol_type = other DNA
ggcctcccaaagtgctggga

SEQ ID NO: 13633 - DNA, 20 bp, synthetic construct
  misc_feature 1..20: note = Description of Artificial Sequence: Synthetic oligonucleotide
  misc_feature 1..20: note = Target: ANGPTL4; (-) strand; PAM type: YTN; PAM sequence: CTT
  source 1..20: mol_type = other DNA
cggcctcccaaagtgctggg

SEQ ID NO: 13634 - DNA, 20 bp, synthetic construct
  misc_feature 1..20: note = Description of Artificial Sequence: Synthetic oligonucleotide
  misc_feature 1..20: note = Target: ANGPTL4; (-) strand; PAM type: YTN; PAM sequence: CTC
  source 1..20: mol_type = other DNA
gtgatccgcccgcttcggcc

SEQ ID NO: 13635 - DNA, 20 bp, synthetic construct
  misc_feature 1..20: note = Description of Artificial Sequence: Synthetic oligonucleotide
  misc_feature 1..20: note = Target: ANGPTL4; (-) strand; PAM type: YTN; PAM sequence: CTG
  source 1..20: mol_type = other DNA
acctcgtgatccgcccgctt

SEQ ID NO: 13636 - DNA, 20 bp, synthetic construct
  misc_feature 1..20: note = Description of Artificial Sequence: Synthetic oligonucleotide
  misc_feature 1..20: note = Target: ANGPTL4; (-) strand; PAM type: YTN; PAM sequence: CTC
  source 1..20: mol_type = other DNA
ctgacctcgtgatccgcccg

SEQ ID NO: 13637 - DNA, 20 bp, synthetic construct
  misc_feature 1..20: note = Description of Artificial Sequence: Synthetic oligonucleotide
  misc_feature 1..20: note = Target: ANGPTL4; (-) strand; PAM type: YTN; PAM sequence: CTC
  source 1..20: mol_type = other DNA
gatctcctgacctcgtgatc

SEQ ID NO: 13638 - DNA, 20 bp, synthetic construct
  misc_feature 1..20: note = Description of Artificial Sequence: Synthetic oligonucleotide
  misc_feature 1..20: note = Target: ANGPTL4; (-) strand; PAM type: YTN; PAM sequence: TTA
  source 1..20: mol_type = other DNA
gccaggatggtctcgatctc

SEQ ID NO: 13639 - DNA, 20 bp, synthetic construct
  misc_feature 1..20: note = Description of Artificial Sequence: Synthetic oligonucleotide
  misc_feature 1..20: note = Target: ANGPTL4; (-) strand; PAM type: YTN; PAM sequence: TTC
  source 1..20: mol_type = other DNA
accatgttagccaggatggt

SEQ ID NO: 13640 - DNA, 20 bp, synthetic construct
  misc_feature 1..20: note = Description of Artificial Sequence: Synthetic oligonucleotide
  misc_feature 1..20: note = Target: ANGPTL4; (-) strand; PAM type: YTN; PAM sequence: TTT
  source 1..20: mol_type = other DNA
caccatgttagccaggatgg

SEQ ID NO: 13641 - DNA, 20 bp, synthetic construct
  misc_feature 1..20: note = Description of Artificial Sequence: Synthetic oligonucleotide
  misc_feature 1..20: note = Target: ANGPTL4; (-) strand; PAM type: YTN; PAM sequence: TTA
  source 1..20: mol_type = other DNA
atagagacagggtttcacca

SEQ ID NO: 13642 - DNA, 20 bp, synthetic construct
  misc_feature 1..20: note = Description of Artificial Sequence: Synthetic oligonucleotide
  misc_feature 1..20: note = Target: ANGPTL4; (-) strand; PAM type: YTN; PAM sequence: TTT
  source 1..20: mol_type = other DNA
aatagagacagggtttcacc

SEQ ID NO: 13643 - DNA, 20 bp, synthetic construct
  misc_feature 1..20: note = Description of Artificial Sequence: Synthetic oligonucleotide
  misc_feature 1..20: note = Target: ANGPTL4; (-) strand; PAM type: YTN; PAM sequence: TTT
  source 1..20: mol_type = other DNA
taatagagacagggtttcac

SEQ ID NO: 13644 - DNA, 20 bp, synthetic construct
  misc_feature 1..20: note = Description of Artificial Sequence: Synthetic oligonucleotide
  misc_feature 1..20: note = Target: ANGPTL4; (-) strand; PAM type: YTN; PAM sequence: TTT
  source 1..20: mol_type = other DNA
ttaatagagacagggtttca

SEQ ID NO: 13645 - DNA, 20 bp, synthetic construct
  misc_feature 1..20: note = Description of Artificial Sequence: Synthetic oligonucleotide
  misc_feature 1..20: note = Target: ANGPTL4; (-) strand; PAM type: YTN; PAM sequence: TTG
  source 1..20: mol_type = other DNA
tatttttaatagagacaggg

SEQ ID NO: 13646 - DNA, 20 bp, synthetic construct
  misc_feature 1..20: note = Description of Artificial Sequence: Synthetic oligonucleotide
  misc_feature 1..20: note = Target: ANGPTL4; (-) strand; PAM type: YTN; PAM sequence: TTT
  source 1..20: mol_type = other DNA
gtatttttaatagagacagg

SEQ ID NO: 13647 - DNA, 20 bp, synthetic construct
  misc_feature 1..20: note = Description of Artificial Sequence: Synthetic oligonucleotide
  misc_feature 1..20: note = Target: ANGPTL4; (-) strand; PAM type: YTN; PAM sequence: TTT
  source 1..20: mol_type = other DNA
tgtatttttaatagagacag

SEQ ID NO: 13648 - DNA, 20 bp, synthetic construct
  misc_feature 1..20: note = Description of Artificial Sequence: Synthetic oligonucleotide
  misc_feature 1..20: note = Target: ANGPTL4; (-) strand; PAM type: YTN; PAM sequence: TTT
  source 1..20: mol_type = other DNA
ttgtatttttaatagagaca

SEQ ID NO: 13649 - DNA, 20 bp, synthetic construct
  misc_feature 1..20: note = Description of Artificial Sequence: Synthetic oligonucleotide
  misc_feature 1..20: note = Target: ANGPTL4; (-) strand; PAM type: YTN; PAM sequence: TTT
  source 1..20: mol_type = other DNA
tttgtatttttaatagagac

SEQ ID NO: 13650 - DNA, 20 bp, synthetic construct
  misc_feature 1..20: note = Description of Artificial Sequence: Synthetic oligonucleotide
  misc_feature 1..20: note = Target: ANGPTL4; (-) strand; PAM type: YTN; PAM sequence: CTA
  source 1..20: mol_type = other DNA
attttttgtatttttaatag

SEQ ID NO: 13651 - DNA, 20 bp, synthetic construct
  misc_feature 1..20: note = Description of Artificial Sequence: Synthetic oligonucleotide
  misc_feature 1..20: note = Target: ANGPTL4; (-) strand; PAM type: YTN; PAM sequence: CTG
  source 1..20: mol_type = other DNA
ccaccatgcccagctaattt

SEQ ID NO: 13652 - DNA, 20 bp, synthetic construct
  misc_feature 1..20: note = Description of Artificial Sequence: Synthetic oligonucleotide
  misc_feature 1..20: note = Target: ANGPTL4; (-) strand; PAM type: YTN; PAM sequence: CTA
  source 1..20: mol_type = other DNA
caggcacctgccaccatgcc

SEQ ID NO: 13653 - DNA, 20 bp, synthetic construct
  misc_feature 1..20: note = Description of Artificial Sequence: Synthetic oligonucleotide
  misc_feature 1..20: note = Target: ANGPTL4; (-) strand; PAM type: YTN; PAM sequence: CTG
  source 1..20: mol_type = other DNA
ggactacaggcacctgccac

SEQ ID NO: 13654 - DNA, 20 bp, synthetic construct
  misc_feature 1..20: note = Description of Artificial Sequence: Synthetic oligonucleotide
  misc_feature 1..20: note = Target: ANGPTL4; (-) strand; PAM type: YTN; PAM sequence: CTC
  source 1..20: mol_type = other DNA
ccgagtagctgggactacag

SEQ ID NO: 13655 - DNA, 20 bp, synthetic construct
  misc_feature 1..20: note = Description of Artificial Sequence: Synthetic oligonucleotide
  misc_feature 1..20: note = Target: ANGPTL4; (-) strand; PAM type: YTN; PAM sequence: CTC
  source 1..20: mol_type = other DNA
agcctcccgagtagctggga

SEQ ID NO: 13656 - DNA, 20 bp, synthetic construct
  misc_feature 1..20: note = Description of Artificial Sequence: Synthetic oligonucleotide
  misc_feature 1..20: note = Target: ANGPTL4; (-) strand; PAM type: YTN; PAM sequence: CTG
  source 1..20: mol_type = other DNA
cctcagcctcccgagtagct

SEQ ID NO: 13657 - DNA, 20 bp, synthetic construct
  misc_feature 1..20: note = Description of Artificial Sequence: Synthetic oligonucleotide
  misc_feature 1..20: note = Target: ANGPTL4; (-) strand; PAM type: YTN; PAM sequence: CTC
  source 1..20: mol_type = other DNA
ctgcctcagcctcccgagta

SEQ ID NO: 13658 - DNA, 20 bp, synthetic construct
  misc_feature 1..20: note = Description of Artificial Sequence: Synthetic oligonucleotide
  misc_feature 1..20: note = Target: ANGPTL4; (-) strand; PAM type: YTN; PAM sequence: TTC
  source 1..20: mol_type = other DNA
tcctgcctcagcctcccgag

SEQ ID NO: 13659 - DNA, 20 bp, synthetic construct
  misc_feature 1..20: note = Description of Artificial Sequence: Synthetic oligonucleotide
  misc_feature 1..20: note = Target: ANGPTL4; (-) strand; PAM type: YTN; PAM sequence: TTA
  source 1..20: mol_type = other DNA
gtgccattctcctgcctcag

SEQ ID NO: 13660 - DNA, 20 bp, synthetic construct
  misc_feature 1..20: note = Description of Artificial Sequence: Synthetic oligonucleotide
  misc_feature 1..20: note = Target: ANGPTL4; (-) strand; PAM type: YTN; PAM sequence: CTC
  source 1..20: mol_type = other DNA
ccgggttagtgccattctcc

SEQ ID NO: 13661 - DNA, 20 bp, synthetic construct
  misc_feature 1..20: note = Description of Artificial Sequence: Synthetic oligonucleotide
  misc_feature 1..20: note = Target: ANGPTL4; (-) strand; PAM type: YTN; PAM sequence: CTC
  source 1..20: mol_type = other DNA
cacctcccgggttagtgcca

SEQ ID NO: 13662 - DNA, 20 bp, synthetic construct
  misc_feature 1..20: note = Description of Artificial Sequence: Synthetic oligonucleotide
  misc_feature 1..20: note = Target: ANGPTL4; (-) strand; PAM type: YTN; PAM sequence: CTG
  source 1..20: mol_type = other DNA
caagctccacctcccgggtt

SEQ ID NO: 13663 - DNA, 20 bp, synthetic construct
  misc_feature 1..20: note = Description of Artificial Sequence: Synthetic oligonucleotide
  misc_feature 1..20: note = Target: ANGPTL4; (-) strand; PAM type: YTN; PAM sequence: CTC
  source 1..20: mol_type = other DNA
actgcaagctccacctcccg

SEQ ID NO: 13664 - DNA, 20 bp, synthetic construct
  misc_feature 1..20: note = Description of Artificial Sequence: Synthetic oligonucleotide
  misc_feature 1..20: note = Target: ANGPTL4; (-) strand; PAM type: YTN; PAM sequence: CTC
  source 1..20: mol_type = other DNA
ggctcactgcaagctccacc

SEQ ID NO: 13665 - DNA, 20 bp, synthetic construct
  misc_feature 1..20: note = Description of Artificial Sequence: Synthetic oligonucleotide
  misc_feature 1..20: note = Target: ANGPTL4; (-) strand; PAM type: YTN; PAM sequence: CTG
  source 1..20: mol_type = other DNA
gagtgcagtggcgcaatctc

SEQ ID NO: 13666 - DNA, 20 bp, synthetic construct
  misc_feature 1..20: note = Description of Artificial Sequence: Synthetic oligonucleotide
  misc_feature 1..20: note = Target: ANGPTL4; (-) strand; PAM type: YTN; PAM sequence: CTG
  source 1..20: mol_type = other DNA
tcgcccacgctggagtgcag

SEQ ID NO: 13667 - DNA, 20 bp, synthetic construct
  misc_feature 1..20: note = Description of Artificial Sequence: Synthetic oligonucleotide
  misc_feature 1..20: note = Target: ANGPTL4; (-) strand; PAM type: YTN; PAM sequence: CTC
  source 1..20: mol_type = other DNA
tgtcgcccacgctggagtgc

SEQ ID NO: 13668 - DNA, 20 bp, synthetic construct
  misc_feature 1..20: note = Description of Artificial Sequence: Synthetic oligonucleotide
  misc_feature 1..20: note = Target: ANGPTL4; (-) strand; PAM type: YTN; PAM sequence: CTC
  source 1..20: mol_type = other DNA
gctctgtcgcccacgctgga

SEQ ID NO: 13669 - DNA, 20 bp, synthetic construct
  misc_feature 1..20: note = Description of Artificial Sequence: Synthetic oligonucleotide
  misc_feature 1..20: note = Target: ANGPTL4; (-) strand; PAM type: YTN; PAM sequence: TTG
  source 1..20: mol_type = other DNA
agaaggagtctcgctctgtc

SEQ ID NO: 13670 - DNA, 20 bp, synthetic construct
  misc_feature 1..20: note = Description of Artificial Sequence: Synthetic oligonucleotide
  misc_feature 1..20: note = Target: ANGPTL4; (-) strand; PAM type: YTN; PAM sequence: TTT
  source 1..20: mol_type = other DNA
gagaaggagtctcgctctgt

SEQ ID NO: 13671 - DNA, 20 bp, synthetic construct
  misc_feature 1..20: note = Description of Artificial Sequence: Synthetic oligonucleotide
  misc_feature 1..20: note = Target: ANGPTL4; (-) strand; PAM type: YTN; PAM sequence: TTT
  source 1..20: mol_type = other DNA
tgagaaggagtctcgctctg

SEQ ID NO: 13672 - DNA, 20 bp, synthetic construct
  misc_feature 1..20: note = Description of Artificial Sequence: Synthetic oligonucleotide
  misc_feature 1..20: note = Target: ANGPTL4; (-) strand; PAM type: YTN; PAM sequence: TTT
  source 1..20: mol_type = other DNA
ttgagaaggagtctcgctct

SEQ ID NO: 13673 - DNA, 20 bp, synthetic construct
  misc_feature 1..20: note = Description of Artificial Sequence: Synthetic oligonucleotide
  misc_feature 1..20: note = Target: ANGPTL4; (-) strand; PAM type: YTN; PAM sequence: TTT
  source 1..20: mol_type = other DNA
tttgagaaggagtctcgctc

SEQ ID NO: 13674 - DNA, 20 bp, synthetic construct
  misc_feature 1..20: note = Description of Artificial Sequence: Synthetic oligonucleotide
  misc_feature 1..20: note = Target: ANGPTL4; (-) strand; PAM type: YTN; PAM sequence: TTA
  source 1..20: mol_type = other DNA
ttttttgagaaggagtctcg

SEQ ID NO: 13675 - DNA, 20 bp, synthetic construct
  misc_feature 1..20: note = Description of Artificial Sequence: Synthetic oligonucleotide
  misc_feature 1..20: note = Target: ANGPTL4; (-) strand; PAM type: YTN; PAM sequence: TTT
  source 1..20: mol_type = other DNA
attttttgagaaggagtctc

SEQ ID NO: 13676 - DNA, 20 bp, synthetic construct
  misc_feature 1..20: note = Description of Artificial Sequence: Synthetic oligonucleotide
  misc_feature 1..20: note = Target: ANGPTL4; (-) strand; PAM type: YTN; PAM sequence: TTA
  source 1..20: mol_type = other DNA
tttattttttgagaaggagt

SEQ ID NO: 13677 - DNA, 20 bp, synthetic construct
  misc_feature 1..20: note = Description of Artificial Sequence: Synthetic oligonucleotide
  misc_feature 1..20: note = Target: ANGPTL4; (-) strand; PAM type: YTN; PAM sequence: TTT
  source 1..20: mol_type = other DNA
atttattttttgagaaggag

SEQ ID NO: 13678 - DNA, 20 bp, synthetic construct
  misc_feature 1..20: note = Description of Artificial Sequence: Synthetic oligonucleotide
  misc_feature 1..20: note = Target: ANGPTL4; (-) strand; PAM type: YTN; PAM sequence: TTA
  source 1..20: mol_type = other DNA
tttatttattttttgagaag

SEQ ID NO: 13679 - DNA, 20 bp, synthetic construct
  misc_feature 1..20: note = Description of Artificial Sequence: Synthetic oligonucleotide
  misc_feature 1..20: note = Target: ANGPTL4; (-) strand; PAM type: YTN; PAM sequence: TTT
  source 1..20: mol_type = other DNA
atttatttattttttgagaa

SEQ ID NO: 13680 - DNA, 20 bp, synthetic construct
  misc_feature 1..20: note = Description of Artificial Sequence: Synthetic oligonucleotide
  misc_feature 1..20: note = Target: ANGPTL4; (-) strand; PAM type: YTN; PAM sequence: TTA
  source 1..20: mol_type = other DNA
tttatttatttattttttga

SEQ ID NO: 13681 - DNA, 20 bp, synthetic construct
  misc_feature 1..20: note = Description of Artificial Sequence: Synthetic oligonucleotide
  misc_feature 1..20: note = Target: ANGPTL4; (-) strand; PAM type: YTN; PAM sequence: TTT
  source 1..20: mol_type = other DNA
atttatttatttattttttg

SEQ ID NO: 13682 - DNA, 20 bp, synthetic construct
  misc_feature 1..20: note = Description of Artificial Sequence: Synthetic oligonucleotide
  misc_feature 1..20: note = Target: ANGPTL4; (-) strand; PAM type: YTN; PAM sequence: TTA
  source 1..20: mol_type = other DNA
tttatttatttatttatttt

SEQ ID NO: 13683 - DNA, 20 bp, synthetic construct
  misc_feature 1..20: note = Description of Artificial Sequence: Synthetic oligonucleotide
  misc_feature 1..20: note = Target: ANGPTL4; (-) strand; PAM type: YTN; PAM sequence: TTT
  source 1..20: mol_type = other DNA
atttatttatttatttattt

SEQ ID NO: 13684 - DNA, 20 bp, synthetic construct
  misc_feature 1..20: note = Description of Artificial Sequence: Synthetic oligonucleotide
  misc_feature 1..20: note = Target: ANGPTL4; (-) strand; PAM type: YTN; PAM sequence: TTA
  source 1..20: mol_type = other DNA
tttatttatttatttattta

SEQ ID NO: 13685 - DNA, 20 bp, synthetic construct
  misc_feature 1..20: note = Description of Artificial Sequence: Synthetic oligonucleotide
  misc_feature 1..20: note = Target: ANGPTL4; (-) strand; PAM type: YTN; PAM sequence: TTT
  source 1..20: mol_type = other DNA
atttatttatttatttattt

SEQ ID NO: 13686 - DNA, 20 bp, synthetic construct
  misc_feature 1..20: note = Description of Artificial Sequence: Synthetic oligonucleotide
  misc_feature 1..20: note = Target: ANGPTL4; (-) strand; PAM type: YTN; PAM sequence: TTA
  source 1..20: mol_type = other DNA
tttatttatttatttattta

SEQ ID NO: 13687 - DNA, 20 bp, synthetic construct
  misc_feature 1..20: note = Description of Artificial Sequence: Synthetic oligonucleotide
  misc_feature 1..20: note = Target: ANGPTL4; (-) strand; PAM type: YTN; PAM sequence: TTT
  source 1..20: mol_type = other DNA
atttatttatttatttattt

SEQ ID NO: 13688 - DNA, 20 bp, synthetic construct
  misc_feature 1..20: note = Description of Artificial Sequence: Synthetic oligonucleotide
  misc_feature 1..20: note = Target: ANGPTL4; (-) strand; PAM type: YTN; PAM sequence: TTA
  source 1..20: mol_type = other DNA
tttatttatttatttattta

SEQ ID NO: 13689 - DNA, 20 bp, synthetic construct
  misc_feature 1..20: note = Description of Artificial Sequence: Synthetic oligonucleotide
  misc_feature 1..20: note = Target: ANGPTL4; (-) strand; PAM type: YTN; PAM sequence: TTT
  source 1..20: mol_type = other DNA
atttatttatttatttattt

SEQ ID NO: 13690 - DNA, 20 bp, synthetic construct
  misc_feature 1..20: note = Description of Artificial Sequence: Synthetic oligonucleotide
  misc_feature 1..20: note = Target: ANGPTL4; (-) strand; PAM type: YTN; PAM sequence: TTA
  source 1..20: mol_type = other DNA
tttatttatttatttattta

SEQ ID NO: 13691 - DNA, 20 bp, synthetic construct
  misc_feature 1..20: note = Description of Artificial Sequence: Synthetic oligonucleotide
  misc_feature 1..20: note = Target: ANGPTL4; (-) strand; PAM type: YTN; PAM sequence: TTT
  source 1..20: mol_type = other DNA
atttatttatttatttattt

SEQ ID NO: 13692 - DNA, 20 bp, synthetic construct
  misc_feature 1..20: note = Description of Artificial Sequence: Synthetic oligonucleotide
  misc_feature 1..20: note = Target: ANGPTL4; (-) strand; PAM type: YTN; PAM sequence: TTT
  source 1..20: mol_type = other DNA
tatttatttatttatttatt

SEQ ID NO: 13693 - DNA, 20 bp, synthetic construct
  misc_feature 1..20: note = Description of Artificial Sequence: Synthetic oligonucleotide
  misc_feature 1..20: note = Target: ANGPTL4; (-) strand; PAM type: YTN; PAM sequence: TTT
  source 1..20: mol_type = other DNA
ttatttatttatttatttat

SEQ ID NO: 13694 - DNA, 20 bp, synthetic construct
  misc_feature 1..20: note = Description of Artificial Sequence: Synthetic oligonucleotide
  misc_feature 1..20: note = Target: ANGPTL4; (-) strand; PAM type: YTN; PAM sequence: TTT
  source 1..20: mol_type = other DNA
tttatttatttatttattta

SEQ ID NO: 13695 - DNA, 20 bp, synthetic construct
  misc_feature 1..20: note = Description of Artificial Sequence: Synthetic oligonucleotide
  misc_feature 1..20: note = Target: ANGPTL4; (-) strand; PAM type: YTN; PAM sequence: TTA
  source 1..20: mol_type = other DNA
ttttttatttatttatttat

SEQ ID NO: 13696 - DNA, 20 bp, synthetic construct
  misc_feature 1..20: note = Description of Artificial Sequence: Synthetic oligonucleotide
  misc_feature 1..20: note = Target: ANGPTL4; (-) strand; PAM type: YTN; PAM sequence: TTT
  source 1..20: mol_type = other DNA
attttttatttatttattta

SEQ ID NO: 13697 - DNA, 20 bp, synthetic construct
  misc_feature 1..20: note = Description of Artificial Sequence: Synthetic oligonucleotide
  misc_feature 1..20: note = Target: ANGPTL4; (-) strand; PAM type: YTN; PAM sequence: CTT
  source 1..20: mol_type = other DNA
tattttttatttatttattt

SEQ ID NO: 13698 - DNA, 20 bp, synthetic construct
  misc_feature 1..20: note = Description of Artificial Sequence: Synthetic oligonucleotide
  misc_feature 1..20: note = Target: ANGPTL4; (-) strand; PAM type: YTN; PAM sequence: CTC
  source 1..20: mol_type = other DNA
tttattttttatttatttat

SEQ ID NO: 13699 - DNA, 20 bp, synthetic construct
  misc_feature 1..20: note = Description of Artificial Sequence: Synthetic oligonucleotide
  misc_feature 1..20: note = Target: ANGPTL4; (-) strand; PAM type: YTN; PAM sequence: CTG
  source 1..20: mol_type = other DNA
ctctttattttttatttatt

SEQ ID NO: 13700 - DNA, 20 bp, synthetic construct
  misc_feature 1..20: note = Description of Artificial Sequence: Synthetic oligonucleotide
  misc_feature 1..20: note = Target: ANGPTL4; (-) strand; PAM type: YTN; PAM sequence: CTA
  source 1..20: mol_type = other DNA
aaaactgctctttatttttt

SEQ ID NO: 13701 - DNA, 20 bp, synthetic construct
  misc_feature 1..20: note = Description of Artificial Sequence: Synthetic oligonucleotide
  misc_feature 1..20: note = Target: ANGPTL4; (-) strand; PAM type: YTN; PAM sequence: TTC
  source 1..20: mol_type = other DNA
taaaaactgctctttatttt

SEQ ID NO: 13702 - DNA, 20 bp, synthetic construct
  misc_feature 1..20: note = Description of Artificial Sequence: Synthetic oligonucleotide
  misc_feature 1..20: note = Target: ANGPTL4; (-) strand; PAM type: YTN; PAM sequence: TTA
  source 1..20: mol_type = other DNA
ttctaaaaactgctctttat

SEQ ID NO: 13703 - DNA, 20 bp, synthetic construct
  misc_feature 1..20: note = Description of Artificial Sequence: Synthetic oligonucleotide
  misc_feature 1..20: note = Target: ANGPTL4; (-) strand; PAM type: YTN; PAM sequence: TTT
  source 1..20: mol_type = other DNA
attctaaaaactgctcttta

SEQ ID NO: 13704 - DNA, 20 bp, synthetic construct
  misc_feature 1..20: note = Description of Artificial Sequence: Synthetic oligonucleotide
  misc_feature 1..20: note = Target: ANGPTL4; (-) strand; PAM type: YTN; PAM sequence: TTT
  source 1..20: mol_type = other DNA
tattctaaaaactgctcttt

SEQ ID NO: 13705 - DNA, 20 bp, synthetic construct
  misc_feature 1..20: note = Description of Artificial Sequence: Synthetic oligonucleotide
  misc_feature 1..20: note = Target: ANGPTL4; (-) strand; PAM type: YTN; PAM sequence: CTA
  source 1..20: mol_type = other DNA
gattttattctaaaaactgc

SEQ ID NO: 13706 - DNA, 20 bp, synthetic construct
  misc_feature 1..20: note = Description of Artificial Sequence: Synthetic oligonucleotide
  misc_feature 1..20: note = Target: ANGPTL4; (-) strand; PAM type: YTN; PAM sequence: CTC
  source 1..20: mol_type = other DNA
tagattttattctaaaaact

SEQ ID NO: 13707 - DNA, 20 bp, synthetic construct
  misc_feature 1..20: note = Description of Artificial Sequence: Synthetic oligonucleotide
  misc_feature 1..20: note = Target: ANGPTL4; (-) strand; PAM type: YTN; PAM sequence: TTG
  source 1..20: mol_type = other DNA
gctctagattttattctaaa

SEQ ID NO: 13708 - DNA, 20 bp, synthetic construct
  misc_feature 1..20: note = Description of Artificial Sequence: Synthetic oligonucleotide
  misc_feature 1..20: note = Target: ANGPTL4; (-) strand; PAM type: YTN; PAM sequence: CTC
  source 1..20: mol_type = other DNA
aagttggctctagattttat

SEQ ID NO: 13709 - DNA, 20 bp, synthetic construct
  misc_feature 1..20: note = Description of Artificial Sequence: Synthetic oligonucleotide
  misc_feature 1..20: note = Target: ANGPTL4; (-) strand; PAM type: YTN; PAM sequence: CTG
  source 1..20: mol_type = other DNA
tcgcctcaagttggctctag

SEQ ID NO: 13710 - DNA, 20 bp, synthetic construct
  misc_feature 1..20: note = Description of Artificial Sequence: Synthetic oligonucleotide
  misc_feature 1..20: note = Target: ANGPTL4; (-) strand; PAM type: YTN; PAM sequence: CTA
  source 1..20: mol_type = other DNA
tactgtcgcctcaagttggc

SEQ ID NO: 13711 - DNA, 20 bp, synthetic construct
  misc_feature 1..20: note = Description of Artificial Sequence: Synthetic oligonucleotide
  misc_feature 1..20: note = Target: ANGPTL4; (-) strand; PAM type: YTN; PAM sequence: CTA
  source 1..20: mol_type = other DNA
caaaagagtctatactgtcg

SEQ ID NO: 13712 - DNA, 20 bp, synthetic construct
  misc_feature 1..20: note = Description of Artificial Sequence: Synthetic oligonucleotide
  misc_feature 1..20: note = Target: ANGPTL4; (-) strand; PAM type: YTN; PAM sequence: CTG
  source 1..20: mol_type = other DNA
tgagcaatctacaaaagagt

SEQ ID NO: 13713 - DNA, 20 bp, synthetic construct
  misc_feature 1..20: note = Description of Artificial Sequence: Synthetic oligonucleotide
  misc_feature 1..20: note = Target: ANGPTL4; (-) strand; PAM type: YTN; PAM sequence: CTG
  source 1..20: mol_type = other DNA
ctgtgagcaatctacaaaag

SEQ ID NO: 13714 - DNA, 20 bp, synthetic construct
  misc_feature 1..20: note = Description of Artificial Sequence: Synthetic oligonucleotide
  misc_feature 1..20: note = Target: ANGPTL4; (-) strand; PAM type: YTN; PAM sequence: TTA
  source 1..20: mol_type = other DNA
agggcacctgctgtgagcaa

SEQ ID NO: 13715 - DNA, 20 bp, synthetic construct
  misc_feature 1..20: note = Description of Artificial Sequence: Synthetic oligonucleotide
  misc_feature 1..20: note = Target: ANGPTL4; (-) strand; PAM type: YTN; PAM sequence: CTT
  source 1..20: mol_type = other DNA
aagggcacctgctgtgagca

SEQ ID NO: 13716 - DNA, 20 bp, synthetic construct
  misc_feature 1..20: note = Description of Artificial Sequence: Synthetic oligonucleotide
  misc_feature 1..20: note = Target: ANGPTL4; (-) strand; PAM type: YTN; PAM sequence: TTG
  source 1..20: mol_type = other DNA
gagccatgtgtcccacagca

SEQ ID NO: 13717 - DNA, 20 bp, synthetic construct
  misc_feature 1..20: note = Description of Artificial Sequence: Synthetic oligonucleotide
  misc_feature 1..20: note = Target: ANGPTL4; (-) strand; PAM type: YTN; PAM sequence: TTT
  source 1..20: mol_type = other DNA
ggagccatgtgtcccacagc

SEQ ID NO: 13718 - DNA, 20 bp, synthetic construct
  misc_feature 1..20: note = Description of Artificial Sequence: Synthetic oligonucleotide
  misc_feature 1..20: note = Target: ANGPTL4; (-) strand; PAM type: YTN; PAM sequence: CTT
  source 1..20: mol_type = other DNA
tggagccatgtgtcccacag

SEQ ID NO: 13719 - DNA, 20 bp, synthetic construct
  misc_feature 1..20: note = Description of Artificial Sequence: Synthetic oligonucleotide
  misc_feature 1..20: note = Target: ANGPTL4; (-) strand; PAM type: YTN; PAM sequence: TTC
  source 1..20: mol_type = other DNA
tttggagccatgtgtcccac

SEQ ID NO: 13720 - DNA, 20 bp, synthetic construct
  misc_feature 1..20: note = Description of Artificial Sequence: Synthetic oligonucleotide
  misc_feature 1..20: note = Target: ANGPTL4; (-) strand; PAM type: YTN; PAM sequence: CTT
  source 1..20: mol_type = other DNA
ctttggagccatgtgtccca

SEQ ID NO: 13721 - DNA, 20 bp, synthetic construct
  misc_feature 1..20: note = Description of Artificial Sequence: Synthetic oligonucleotide
  misc_feature 1..20: note = Target: ANGPTL4; (-) strand; PAM type: YTN; PAM sequence: TTC
  source 1..20: mol_type = other DNA
agggacttctttggagccat

SEQ ID NO: 13722 - DNA, 20 bp, synthetic construct
  misc_feature 1..20: note = Description of Artificial Sequence: Synthetic oligonucleotide
  misc_feature 1..20: note = Target: ANGPTL4; (-) strand; PAM type: YTN; PAM sequence: TTT
  source 1..20: mol_type = other DNA
cagggacttctttggagcca

SEQ ID NO: 13723 - DNA, 20 bp, synthetic construct
  misc_feature 1..20: note = Description of Artificial Sequence: Synthetic oligonucleotide
  misc_feature 1..20: note = Target: ANGPTL4; (-) strand; PAM type: YTN; PAM sequence: TTT
  source 1..20: mol_type = other DNA
tcagggacttctttggagcc

SEQ ID NO: 13724 - DNA, 20 bp, synthetic construct
  misc_feature 1..20: note = Description of Artificial Sequence: Synthetic oligonucleotide
  misc_feature 1..20: note = Target: ANGPTL4; (-) strand; PAM type: YTN; PAM sequence: CTG
  source 1..20: mol_type = other DNA
attttcagggacttctttgg

SEQ ID NO: 13725 - DNA, 20 bp, synthetic construct
  misc_feature 1..20: note = Description of Artificial Sequence: Synthetic oligonucleotide
  misc_feature 1..20: note = Target: ANGPTL4; (-) strand; PAM type: YTN; PAM sequence: TTC
  source 1..20: mol_type = other DNA
atgatctgattttcagggac

SEQ ID NO: 13726 - DNA, 20 bp, synthetic construct
  misc_feature 1..20: note = Description of Artificial Sequence: Synthetic oligonucleotide
  misc_feature 1..20: note = Target: ANGPTL4; (-) strand; PAM type: YTN; PAM sequence: TTT
  source 1..20: mol_type = other DNA
catgatctgattttcaggga

SEQ ID NO: 13727 - DNA, 20 bp, synthetic construct
  misc_feature 1..20: note = Description of Artificial Sequence: Synthetic oligonucleotide
  misc_feature 1..20: note = Target: ANGPTL4; (-) strand; PAM type: YTN; PAM sequence: TTT
  source 1..20: mol_type = other DNA
tcatgatctgattttcaggg

SEQ ID NO: 13728 - DNA, 20 bp, synthetic construct
  misc_feature 1..20: note = Description of Artificial Sequence: Synthetic oligonucleotide
  misc_feature 1..20: note = Target: ANGPTL4; (-) strand; PAM type: YTN; PAM sequence: CTT
  source 1..20: mol_type = other DNA
ttcatgatctgattttcagg

SEQ ID NO: 13729 - DNA, 20 bp, synthetic construct
  misc_feature 1..20: note = Description of Artificial Sequence: Synthetic oligonucleotide
  misc_feature 1..20: note = Target: ANGPTL4; (-) strand; PAM type: YTN; PAM sequence: CTG
  source 1..20: mol_type = other DNA
atgaccttttcatgatctga

SEQ ID NO: 13730 - DNA, 20 bp, synthetic construct
  misc_feature 1..20: note = Description of Artificial Sequence: Synthetic oligonucleotide
  misc_feature 1..20: note = Target: ANGPTL4; (-) strand; PAM type: YTN; PAM sequence: TTC
  source 1..20: mol_type = other DNA
cccaacctgatgaccttttc

SEQ ID NO: 13731 - DNA, 20 bp, synthetic construct
  misc_feature 1..20: note = Description of Artificial Sequence: Synthetic oligonucleotide
  misc_feature 1..20: note = Target: ANGPTL4; (-) strand; PAM type: YTN; PAM sequence: CTT
  source 1..20: mol_type = other DNA
ccccaacctgatgacctttt

SEQ ID NO: 13732 - DNA, 20 bp, synthetic construct
  misc_feature 1..20: note = Description of Artificial Sequence: Synthetic oligonucleotide
  misc_feature 1..20: note = Target: ANGPTL4; (-) strand; PAM type: YTN; PAM sequence: TTA
  source 1..20: mol_type = other DNA
cttccccaacctgatgacct

SEQ ID NO: 13733 - DNA, 20 bp, synthetic construct
  misc_feature 1..20: note = Description of Artificial Sequence: Synthetic oligonucleotide
  misc_feature 1..20: note = Target: ANGPTL4; (-) strand; PAM type: YTN; PAM sequence: CTG
  source 1..20: mol_type = other DNA
atcaattacttccccaacct

SEQ ID NO: 13734 - DNA, 20 bp, synthetic construct
  misc_feature 1..20: note = Description of Artificial Sequence: Synthetic oligonucleotide
  misc_feature 1..20: note = Target: ANGPTL4; (-) strand; PAM type: YTN; PAM sequence: CTG
  source 1..20: mol_type = other DNA
agagaactgatcaattactt

SEQ ID NO: 13735 - DNA, 20 bp, synthetic construct
  misc_feature 1..20: note = Description of Artificial Sequence: Synthetic oligonucleotide
  misc_feature 1..20: note = Target: ANGPTL4; (-) strand; PAM type: YTN; PAM sequence: TTA
  source 1..20: mol_type = other DNA
aactgagagaactgatcaat

SEQ ID NO: 13736 - DNA, 20 bp, synthetic construct
  misc_feature 1..20: note = Description of Artificial Sequence: Synthetic oligonucleotide
  misc_feature 1..20: note = Target: ANGPTL4; (-) strand; PAM type: YTN; PAM sequence: CTT
  source 1..20: mol_type = other DNA
aaactgagagaactgatcaa

SEQ ID NO: 13737 - DNA, 20 bp, synthetic construct
  misc_feature 1..20: note = Description of Artificial Sequence: Synthetic oligonucleotide
  misc_feature 1..20: note = Target: ANGPTL4; (-) strand; PAM type: YTN; PAM sequence: TTC
  source 1..20: mol_type = other DNA
ttaaactgagagaactgatc

SEQ ID NO: 13738 - DNA, 20 bp, synthetic construct
  misc_feature 1..20: note = Description of Artificial Sequence: Synthetic oligonucleotide
  misc_feature 1..20: note = Target: ANGPTL4; (-) strand; PAM type: YTN; PAM sequence: CTT
  source 1..20: mol_type = other DNA
cttaaactgagagaactgat

SEQ ID NO: 13739 - DNA, 20 bp, synthetic construct
  misc_feature 1..20: note = Description of Artificial Sequence: Synthetic oligonucleotide
  misc_feature 1..20: note = Target: ANGPTL4; (-) strand; PAM type: YTN; PAM sequence: TTC
  source 1..20: mol_type = other DNA
cccaccttcttaaactgaga

SEQ ID NO: 13740 - DNA, 20 bp, synthetic construct
  misc_feature 1..20: note = Description of Artificial Sequence: Synthetic oligonucleotide
  misc_feature 1..20: note = Target: ANGPTL4; (-) strand; PAM type: YTN; PAM sequence: CTT
  source 1..20: mol_type = other DNA
ccccaccttcttaaactgag

SEQ ID NO: 13741 - DNA, 20 bp, synthetic construct
  misc_feature 1..20: note = Description of Artificial Sequence: Synthetic oligonucleotide
  misc_feature 1..20: note = Target: ANGPTL4; (-) strand; PAM type: YTN; PAM sequence: CTC
  source 1..20: mol_type = other DNA
ttccccaccttcttaaactg

SEQ ID NO: 13742 - DNA, 20 bp, synthetic construct
  misc_feature 1..20: note = Description of Artificial Sequence: Synthetic oligonucleotide
  misc_feature 1..20: note = Target: ANGPTL4; (-) strand; PAM type: YTN; PAM sequence: CTC
  source 1..20: mol_type = other DNA
ctcttccccaccttcttaaa

SEQ ID NO: 13743 - DNA, 20 bp, synthetic construct
  misc_feature 1..20: note = Description of Artificial Sequence: Synthetic oligonucleotide
  misc_feature 1..20: note = Target: ANGPTL4; (-) strand; PAM type: YTN; PAM sequence: CTC
  source 1..20: mol_type = other DNA
ctcctcttccccaccttctt

SEQ ID NO: 13744 - DNA, 20 bp, synthetic construct
  misc_feature 1..20: note = Description of Artificial Sequence: Synthetic oligonucleotide
  misc_feature 1..20: note = Target: ANGPTL4; (-) strand; PAM type: YTN; PAM sequence: CTA
  source 1..20: mol_type = other DNA
tcccagaatgcaagctcctc

SEQ ID NO: 13745 - DNA, 20 bp, synthetic construct
  misc_feature 1..20: note = Description of Artificial Sequence: Synthetic oligonucleotide
  misc_feature 1..20: note = Target: ANGPTL4; (-) strand; PAM type: YTN; PAM sequence: CTA
  source 1..20: mol_type = other DNA
tcccaggctatcccagaatg

SEQ ID NO: 13746 - DNA, 20 bp, synthetic construct
  misc_feature 1..20: note = Description of Artificial Sequence: Synthetic oligonucleotide
  misc_feature 1..20: note = Target: ANGPTL4; (-) strand; PAM type: YTN; PAM sequence: CTG
  source 1..20: mol_type = other DNA
agtagggacacagctatccc

SEQ ID NO: 13747 - DNA, 20 bp, synthetic construct
  misc_feature 1..20: note = Description of Artificial Sequence: Synthetic oligonucleotide
  misc_feature 1..20: note = Target: ANGPTL4; (-) strand; PAM type: YTN; PAM sequence: CTC
  source 1..20: mol_type = other DNA
tgagtagggacacagctatc

SEQ ID NO: 13748 - DNA, 20 bp, synthetic construct
  misc_feature 1..20: note = Description of Artificial Sequence: Synthetic oligonucleotide
  misc_feature 1..20: note = Target: ANGPTL4; (-) strand; PAM type: YTN; PAM sequence: CTC
  source 1..20: mol_type = other DNA
tctgagtagggacacagcta

SEQ ID NO: 13749 - DNA, 20 bp, synthetic construct
  misc_feature 1..20: note = Description of Artificial Sequence: Synthetic oligonucleotide
  misc_feature 1..20: note = Target: ANGPTL4; (-) strand; PAM type: YTN; PAM sequence: CTC
  source 1..20: mol_type = other DNA
tctctgagtagggacacagc

SEQ ID NO: 13750 - DNA, 20 bp, synthetic construct
  misc_feature 1..20: note = Description of Artificial Sequence: Synthetic oligonucleotide
  misc_feature 1..20: note = Target: ANGPTL4; (-) strand; PAM type: YTN; PAM sequence: CTG
  source 1..20: mol_type = other DNA
tccacccccaagcccccagc

SEQ ID NO: 13751 - DNA, 20 bp, synthetic construct
  misc_feature 1..20: note = Description of Artificial Sequence: Synthetic oligonucleotide
  misc_feature 1..20: note = Target: ANGPTL4; (-) strand; PAM type: YTN; PAM sequence: CTG
  source 1..20: mol_type = other DNA
gcctgtccacccccaagccc

SEQ ID NO: 13752 - DNA, 20 bp, synthetic construct
  misc_feature 1..20: note = Description of Artificial Sequence: Synthetic oligonucleotide
  misc_feature 1..20: note = Target: ANGPTL4; (-) strand; PAM type: YTN; PAM sequence: TTC
  source 1..20: mol_type = other DNA
agatggtcaccgtctggcct

SEQ ID NO: 13753 - DNA, 20 bp, synthetic construct
  misc_feature 1..20: note = Description of Artificial Sequence: Synthetic oligonucleotide
  misc_feature 1..20: note = Target: ANGPTL4; (-) strand; PAM type: YTN; PAM sequence: CTC
  source 1..20: mol_type = other DNA
ccagcagcagtggacaggaa

SEQ ID NO: 13754 - DNA, 20 bp, synthetic construct
  misc_feature 1..20: note = Description of Artificial Sequence: Synthetic oligonucleotide
  misc_feature 1..20: note = Target: ANGPTL4; (-) strand; PAM type: YTN; PAM sequence: CTG
  source 1..20: mol_type = other DNA
ggccagatgccaggacagca

SEQ ID NO: 13755 - DNA, 20 bp, synthetic construct
  misc_feature 1..20: note = Description of Artificial Sequence: Synthetic oligonucleotide
  misc_feature 1..20: note = Target: ANGPTL4; (-) strand; PAM type: YTN; PAM sequence: TTG
  source 1..20: mol_type = other DNA
gccccgtcagctgggccaga

SEQ ID NO: 13756 - DNA, 20 bp, synthetic construct
  misc_feature 1..20: note = Description of Artificial Sequence: Synthetic oligonucleotide
  misc_feature 1..20: note = Target: ANGPTL4; (-) strand; PAM type: YTN; PAM sequence: CTT
  source 1..20: mol_type = other DNA
ggccccgtcagctgggccag

SEQ ID NO: 13757 - DNA, 20 bp, synthetic construct
  misc_feature 1..20: note = Description of Artificial Sequence: Synthetic oligonucleotide
  misc_feature 1..20: note = Target: ANGPTL4; (-) strand; PAM type: YTN; PAM sequence: CTC
  source 1..20: mol_type = other DNA
atacacttggccccgtcagc

SEQ ID NO: 13758 - DNA, 20 bp, synthetic construct
  misc_feature 1..20: note = Description of Artificial Sequence: Synthetic oligonucleotide
  misc_feature 1..20: note = Target: ANGPTL4; (-) strand; PAM type: YTN; PAM sequence: CTG
  source 1..20: mol_type = other DNA
ccactcatacacttggcccc

SEQ ID NO: 13759 - DNA, 20 bp, synthetic construct
  misc_feature 1..20: note = Description of Artificial Sequence: Synthetic oligonucleotide
  misc_feature 1..20: note = Target: ANGPTL4; (-) strand; PAM type: YTN; PAM sequence: CTG
  source 1..20: mol_type = other DNA
acgtgcaggctgccactcat

SEQ ID NO: 13760 - DNA, 20 bp, synthetic construct
  misc_feature 1..20: note = Description of Artificial Sequence: Synthetic oligonucleotide
  misc_feature 1..20: note = Target: ANGPTL4; (-) strand; PAM type: YTN; PAM sequence: CTG
  source 1..20: mol_type = other DNA
cacacccaagggctgacgtg

SEQ ID NO: 13761 - DNA, 20 bp, synthetic construct
  misc_feature 1..20: note = Description of Artificial Sequence: Synthetic oligonucleotide
  misc_feature 1..20: note = Target: ANGPTL4; (-) strand; PAM type: YTN; PAM sequence: CTG
  source 1..20: mol_type = other DNA
aaactgcacacccaagggct

SEQ ID NO: 13762 - DNA, 20 bp, synthetic construct
  misc_feature 1..20: note = Description of Artificial Sequence: Synthetic oligonucleotide
  misc_feature 1..20: note = Target: ANGPTL4; (-) strand; PAM type: YTN; PAM sequence: CTG
  source 1..20: mol_type = other DNA
gaatctgaaactgcacaccc

SEQ ID NO: 13763 - DNA, 20 bp, synthetic construct
  misc_feature 1..20: note = Description of Artificial Sequence: Synthetic oligonucleotide
  misc_feature 1..20: note = Target: ANGPTL4; (-) strand; PAM type: YTN; PAM sequence: CTC
  source 1..20: mol_type = other DNA
tggaatctgaaactgcacac

SEQ ID NO: 13764 - DNA, 20 bp, synthetic construct
  misc_feature 1..20: note = Description of Artificial Sequence: Synthetic oligonucleotide
  misc_feature 1..20: note = Target: ANGPTL4; (-) strand; PAM type: YTN; PAM sequence: TTC
  source 1..20: mol_type = other DNA
tctggaatctgaaactgcac

SEQ ID NO: 13765 - DNA, 20 bp, synthetic construct
  misc_feature 1..20: note = Description of Artificial Sequence: Synthetic oligonucleotide
  misc_feature 1..20: note = Target: ANGPTL4; (-) strand; PAM type: YTN; PAM sequence: CTC
  source 1..20: mol_type = other DNA
attctctggaatctgaaact

SEQ ID NO: 13766 - DNA, 20 bp, synthetic construct
  misc_feature 1..20: note = Description of Artificial Sequence: Synthetic oligonucleotide
  misc_feature 1..20: note = Target: ANGPTL4; (-) strand; PAM type: YTN; PAM sequence: CTC
  source 1..20: mol_type = other DNA
caagccagctcattctctgg

SEQ ID NO: 13767 - DNA, 20 bp, synthetic construct
  misc_feature 1..20: note = Description of Artificial Sequence: Synthetic oligonucleotide
  misc_feature 1..20: note = Target: ANGPTL4; (-) strand; PAM type: YTN; PAM sequence: CTC
  source 1..20: mol_type = other DNA
agcagggctccaagccagct

SEQ ID NO: 13768 - DNA, 20 bp, synthetic construct
  misc_feature 1..20: note = Description of Artificial Sequence: Synthetic oligonucleotide
  misc_feature 1..20: note = Target: ANGPTL4; (-) strand; PAM type: YTN; PAM sequence: TTG
  source 1..20: mol_type = other DNA
actcagcagggctccaagcc

SEQ ID NO: 13769 - DNA, 20 bp, synthetic construct
  misc_feature 1..20: note = Description of Artificial Sequence: Synthetic oligonucleotide
  misc_feature 1..20: note = Target: ANGPTL4; (-) strand; PAM type: YTN; PAM sequence: CTG
  source 1..20: mol_type = other DNA
gcaaggagaagggcattgac

SEQ ID NO: 13770 - DNA, 20 bp, synthetic construct
  misc_feature 1..20: note = Description of Artificial Sequence: Synthetic oligonucleotide
  misc_feature 1..20: note = Target: ANGPTL4; (-) strand; PAM type: YTN; PAM sequence: CTC
  source 1..20: mol_type = other DNA
agagcactggcaaggagaag

SEQ ID NO: 13771 - DNA, 20 bp, synthetic construct
  misc_feature 1..20: note = Description of Artificial Sequence: Synthetic oligonucleotide
  misc_feature 1..20: note = Target: ANGPTL4; (-) strand; PAM type: YTN; PAM sequence: TTG
  source 1..20: mol_type = other DNA
gctcagagcactggcaagga

SEQ ID NO: 13772 - DNA, 20 bp, synthetic construct
  misc_feature 1..20: note = Description of Artificial Sequence: Synthetic oligonucleotide
  misc_feature 1..20: note = Target: ANGPTL4; (-) strand; PAM type: YTN; PAM sequence: CTC
  source 1..20: mol_type = other DNA
ggggcaggttggctcagagc

SEQ ID NO: 13773 - DNA, 20 bp, synthetic construct
  misc_feature 1..20: note = Description of Artificial Sequence: Synthetic oligonucleotide
  misc_feature 1..20: note = Target: ANGPTL4; (-) strand; PAM type: YTN; PAM sequence: CTG
  source 1..20: mol_type = other DNA
ccaggaagaactcggggcag

SEQ ID NO: 13774 - DNA, 20 bp, synthetic construct
  misc_feature 1..20: note = Description of Artificial Sequence: Synthetic oligonucleotide
  misc_feature 1..20: note = Target: ANGPTL4; (-) strand; PAM type: YTN; PAM sequence: CTG
  source 1..20: mol_type = other DNA
gcacagaaaaccagcctgcc

SEQ ID NO: 13775 - DNA, 20 bp, synthetic construct
  misc_feature 1..20: note = Description of Artificial Sequence: Synthetic oligonucleotide
  misc_feature 1..20: note = Target: ANGPTL4; (-) strand; PAM type: YTN; PAM sequence: CTG
  source 1..20: mol_type = other DNA
tcaggaaggggaggctggca

SEQ ID NO: 13776 - DNA, 20 bp, synthetic construct
  misc_feature 1..20: note = Description of Artificial Sequence: Synthetic oligonucleotide
  misc_feature 1..20: note = Target: ANGPTL4; (-) strand; PAM type: YTN; PAM sequence: CTA
  source 1..20: mol_type = other DNA
taccctgtcaggaaggggag

SEQ ID NO: 13777 - DNA, 20 bp, synthetic construct
  misc_feature 1..20: note = Description of Artificial Sequence: Synthetic oligonucleotide
  misc_feature 1..20: note = Target: ANGPTL4; (-) strand; PAM type: YTN; PAM sequence: TTC
  source 1..20: mol_type = other DNA
ccctataccctgtcaggaag

SEQ ID NO: 13778 - DNA, 20 bp, synthetic construct
  misc_feature 1..20: note = Description of Artificial Sequence: Synthetic oligonucleotide
  misc_feature 1..20: note = Target: ANGPTL4; (-) strand; PAM type: YTN; PAM sequence: CTA
  source 1..20: mol_type = other DNA
cccattcccctataccctgt

SEQ ID NO: 13779 - DNA, 20 bp, synthetic construct
  misc_feature 1..20: note = Description of Artificial Sequence: Synthetic oligonucleotide
  misc_feature 1..20: note = Target: ANGPTL4; (-) strand; PAM type: YTN; PAM sequence: TTC
  source 1..20: mol_type = other DNA
cctacccattcccctatacc

SEQ ID NO: 13780 - DNA, 20 bp, synthetic construct
  misc_feature 1..20: note = Description of Artificial Sequence: Synthetic oligonucleotide
  misc_feature 1..20: note = Target: ANGPTL4; (-) strand; PAM type: YTN; PAM sequence: CTT
  source 1..20: mol_type = other DNA
ccctacccattcccctatac

SEQ ID NO: 13781 - DNA, 20 bp, synthetic construct
  misc_feature 1..20: note = Description of Artificial Sequence: Synthetic oligonucleotide
  misc_feature 1..20: note = Target: ANGPTL4; (-) strand; PAM type: YTN; PAM sequence: CTC
  source 1..20: mol_type = other DNA
ttccctacccattcccctat

SEQ ID NO: 13782 - DNA, 20 bp, synthetic construct
  misc_feature 1..20: note = Description of Artificial Sequence: Synthetic oligonucleotide
  misc_feature 1..20: note = Target: ANGPTL4; (-) strand; PAM type: YTN; PAM sequence: CTG
  source 1..20: mol_type = other DNA
cctcttccctacccattccc

SEQ ID NO: 13783 - DNA, 20 bp, synthetic construct
  misc_feature 1..20: note = Description of Artificial Sequence: Synthetic oligonucleotide
  misc_feature 1..20: note = Target: ANGPTL4; (-) strand; PAM type: YTN; PAM sequence: CTC
  source 1..20: mol_type = other DNA
tgcctcttccctacccattc

SEQ ID NO: 13784 - DNA, 20 bp, synthetic construct
  misc_feature 1..20: note = Description of Artificial Sequence: Synthetic oligonucleotide
  misc_feature 1..20: note = Target: ANGPTL4; (-) strand; PAM type: YTN; PAM sequence: CTC
  source 1..20: mol_type = other DNA
ctctgcctcttccctaccca

SEQ ID NO: 13785 - DNA, 20 bp, synthetic construct
  misc_feature 1..20: note = Description of Artificial Sequence: Synthetic oligonucleotide
  misc_feature 1..20: note = Target: ANGPTL4; (-) strand; PAM type: YTN; PAM sequence: TTG
  source 1..20: mol_type = other DNA
caccgatctcctctgcctct

SEQ ID NO: 13786 - DNA, 20 bp, synthetic construct
  misc_feature 1..20: note = Description of Artificial Sequence: Synthetic oligonucleotide
  misc_feature 1..20: note = Target: ANGPTL4; (-) strand; PAM type: YTN; PAM sequence: CTT
  source 1..20: mol_type = other DNA
gcaccgatctcctctgcctc

SEQ ID NO: 13787 - DNA, 20 bp, synthetic construct
  misc_feature 1..20: note = Description of Artificial Sequence: Synthetic oligonucleotide
  misc_feature 1..20: note = Target: ANGPTL4; (-) strand; PAM type: YTN; PAM sequence: TTC
  source 1..20: mol_type = other DNA
aaacttgcaccgatctcctc

SEQ ID NO: 13788 - DNA, 20 bp, synthetic construct
  misc_feature 1..20: note = Description of Artificial Sequence: Synthetic oligonucleotide
  misc_feature 1..20: note = Target: ANGPTL4; (-) strand; PAM type: YTN; PAM sequence: TTC
  source 1..20: mol_type = other DNA
attcaaacttgcaccgatct

SEQ ID NO: 13789 - DNA, 20 bp, synthetic construct
  misc_feature 1..20: note = Description of Artificial Sequence: Synthetic oligonucleotide
  misc_feature 1..20: note = Target: ANGPTL4; (-) strand; PAM type: YTN; PAM sequence: CTA
  source 1..20: mol_type = other DNA
agtgttcattcaaacttgca

SEQ ID NO: 13790 - DNA, 20 bp, synthetic construct
  misc_feature 1..20: note = Description of Artificial Sequence: Synthetic oligonucleotide
  misc_feature 1..20: note = Target: ANGPTL4; (-) strand; PAM type: YTN; PAM sequence: TTC
  source 1..20: mol_type = other DNA
cacagggctaagtgttcatt

SEQ ID NO: 13791 - DNA, 20 bp, synthetic construct
  misc_feature 1..20: note = Description of Artificial Sequence: Synthetic oligonucleotide
  misc_feature 1..20: note = Target: ANGPTL4; (-) strand; PAM type: YTN; PAM sequence: TTC
  source 1..20: mol_type = other DNA
attccacagggctaagtgtt

SEQ ID NO: 13792 - DNA, 20 bp, synthetic construct
  misc_feature 1..20: note = Description of Artificial Sequence: Synthetic oligonucleotide
  misc_feature 1..20: note = Target: ANGPTL4; (-) strand; PAM type: YTN; PAM sequence: CTG
  source 1..20: mol_type = other DNA
gaccacattcattccacagg

SEQ ID NO: 13793 - DNA, 20 bp, synthetic construct
  misc_feature 1..20: note = Description of Artificial Sequence: Synthetic oligonucleotide
  misc_feature 1..20: note = Target: ANGPTL4; (-) strand; PAM type: YTN; PAM sequence: CTA
  source 1..20: mol_type = other DNA
aagggctggaccacattcat

SEQ ID NO: 13794 - DNA, 20 bp, synthetic construct
  misc_feature 1..20: note = Description of Artificial Sequence: Synthetic oligonucleotide
  misc_feature 1..20: note = Target: ANGPTL4; (-) strand; PAM type: YTN; PAM sequence: CTG
  source 1..20: mol_type = other DNA
agtgaggctaaagggctgga

SEQ ID NO: 13795 - DNA, 20 bp, synthetic construct
  misc_feature 1..20: note = Description of Artificial Sequence: Synthetic oligonucleotide
  misc_feature 1..20: note = Target: ANGPTL4; (-) strand; PAM type: YTN; PAM sequence: TTG
  source 1..20: mol_type = other DNA
ggacaaaggaagtactgagt

SEQ ID NO: 13796 - DNA, 20 bp, synthetic construct
  misc_feature 1..20: note = Description of Artificial Sequence: Synthetic oligonucleotide
  misc_feature 1..20: note = Target: ANGPTL4; (-) strand; PAM type: YTN; PAM sequence: CTG
  source 1..20: mol_type = other DNA
gggtagggatagagttggga

SEQ ID NO: 13797 - DNA, 20 bp, synthetic construct
  misc_feature 1..20: note = Description of Artificial Sequence: Synthetic oligonucleotide
  misc_feature 1..20: note = Target: ANGPTL4; (-) strand; PAM type: YTN; PAM sequence: CTG
  source 1..20: mol_type = other DNA
agcctggggtagggatagag

SEQ ID NO: 13798 - DNA, 20 bp, synthetic construct
  misc_feature 1..20: note = Description of Artificial Sequence: Synthetic oligonucleotide
  misc_feature 1..20: note = Target: ANGPTL4; (-) strand; PAM type: YTN; PAM sequence: TTC
  source 1..20: mol_type = other DNA
tgagcctggggtagggatag

SEQ ID NO: 13799 - DNA, 20 bp, synthetic construct
  misc_feature 1..20: note = Description of Artificial Sequence: Synthetic oligonucleotide
  misc_feature 1..20: note = Target: ANGPTL4; (-) strand; PAM type: YTN; PAM sequence: CTC
  source 1..20: mol_type = other DNA
aggcaggtggagatacccca

SEQ ID NO: 13800 - DNA, 20 bp, synthetic construct
  misc_feature 1..20: note = Description of Artificial Sequence: Synthetic oligonucleotide
  misc_feature 1..20: note = Target: ANGPTL4; (-) strand; PAM type: YTN; PAM sequence: TTC
  source 1..20: mol_type = other DNA
tcaggcaggtggagataccc

SEQ ID NO: 13801 - DNA, 20 bp, synthetic construct
  misc_feature 1..20: note = Description of Artificial Sequence: Synthetic oligonucleotide
  misc_feature 1..20: note = Target: ANGPTL4; (-) strand; PAM type: YTN; PAM sequence: TTG
  source 1..20: mol_type = other DNA
aagttctcaggcaggtggag

SEQ ID NO: 13802 - DNA, 20 bp, synthetic construct
  misc_feature 1..20: note = Description of Artificial Sequence: Synthetic oligonucleotide
  misc_feature 1..20: note = Target: ANGPTL4; (-) strand; PAM type: YTN; PAM sequence: TTT
  source 1..20: mol_type = other DNA
gaagttctcaggcaggtgga

SEQ ID NO: 13803 - DNA, 20 bp, synthetic construct
  misc_feature 1..20: note = Description of Artificial Sequence: Synthetic oligonucleotide
  misc_feature 1..20: note = Target: ANGPTL4; (-) strand; PAM type: YTN; PAM sequence: CTG
  source 1..20: mol_type = other DNA
tatgtttgaagttctcaggc

SEQ ID NO: 13804 - DNA, 20 bp, synthetic construct
  misc_feature 1..20: note = Description of Artificial Sequence: Synthetic oligonucleotide
  misc_feature 1..20: note = Target: ANGPTL4; (-) strand; PAM type: YTN; PAM sequence: CTA
  source 1..20: mol_type = other DNA
agcccagcccctgtatgttt

SEQ ID NO: 13805 - DNA, 20 bp, synthetic construct
  misc_feature 1..20: note = Description of Artificial Sequence: Synthetic oligonucleotide
  misc_feature 1..20: note = Target: ANGPTL4; (-) strand; PAM type: YTN; PAM sequence: CTC
  source 1..20: mol_type = other DNA
taagcccagcccctgtatgt

SEQ ID NO: 13806 - DNA, 20 bp, synthetic construct
  misc_feature 1..20: note = Description of Artificial Sequence: Synthetic oligonucleotide
  misc_feature 1..20: note = Target: ANGPTL4; (-) strand; PAM type: YTN; PAM sequence: CTG
  source 1..20: mol_type = other DNA
ccctctaagcccagcccctg

SEQ ID NO: 13807 - DNA, 20 bp, synthetic construct
  misc_feature 1..20: note = Description of Artificial Sequence: Synthetic oligonucleotide
  misc_feature 1..20: note = Target: ANGPTL4; (-) strand; PAM type: YTN; PAM sequence: CTG
  source 1..20: mol_type = other DNA
ctgccctctaagcccagccc

SEQ ID NO: 13808 - DNA, 20 bp, synthetic construct
  misc_feature 1..20: note = Description of Artificial Sequence: Synthetic oligonucleotide
  misc_feature 1..20: note = Target: ANGPTL4; (-) strand; PAM type: YTN; PAM sequence: CTG
  source 1..20: mol_type = other DNA
aacgaaggtgctgctgccct

SEQ ID NO: 13809 - DNA, 20 bp, synthetic construct
  misc_feature 1..20: note = Description of Artificial Sequence: Synthetic oligonucleotide
  misc_feature 1..20: note = Target: ANGPTL4; (-) strand; PAM type: YTN; PAM sequence: CTC
  source 1..20: mol_type = other DNA
atgcactgaacgaaggtgct

SEQ ID NO: 13810 - DNA, 20 bp, synthetic construct
  misc_feature 1..20: note = Description of Artificial Sequence: Synthetic oligonucleotide
  misc_feature 1..20: note = Target: ANGPTL4; (-) strand; PAM type: YTN; PAM sequence: TTC
  source 1..20: mol_type = other DNA
actcatgcactgaacgaagg

SEQ ID NO: 13811 - DNA, 20 bp, synthetic construct
  misc_feature 1..20: note = Description of Artificial Sequence: Synthetic oligonucleotide
  misc_feature 1..20: note = Target: ANGPTL4; (-) strand; PAM type: YTN; PAM sequence: TTC
  source 1..20: mol_type = other DNA
attcactcatgcactgaacg

SEQ ID NO: 13812 - DNA, 20 bp, synthetic construct
  misc_feature 1..20: note = Description of Artificial Sequence: Synthetic oligonucleotide
  misc_feature 1..20: note = Target: ANGPTL4; (-) strand; PAM type: YTN; PAM sequence: TTC
  source 1..20: mol_type = other DNA
attcattcactcatgcactg

SEQ ID NO: 13813 - DNA, 20 bp, synthetic construct
  misc_feature 1..20: note = Description of Artificial Sequence: Synthetic oligonucleotide
  misc_feature 1..20: note = Target: ANGPTL4; (-) strand; PAM type: YTN; PAM sequence: CTC
  source 1..20: mol_type = other DNA
attcattcattcactcatgc

SEQ ID NO: 13814 - DNA, 20 bp, synthetic construct
  misc_feature 1..20: note = Description of Artificial Sequence: Synthetic oligonucleotide
  misc_feature 1..20: note = Target: ANGPTL4; (-) strand; PAM type: YTN; PAM sequence: CTC
  source 1..20: mol_type = other DNA
cctcattcattcattcactc

SEQ ID NO: 13815 - DNA, 20 bp, synthetic construct
  misc_feature 1..20: note = Description of Artificial Sequence: Synthetic oligonucleotide
  misc_feature 1..20: note = Target: ANGPTL4; (-) strand; PAM type: YTN; PAM sequence: CTC
  source 1..20: mol_type = other DNA
tccctcattcattcattcac

SEQ ID NO: 13816 - DNA, 20 bp, synthetic construct
  misc_feature 1..20: note = Description of Artificial Sequence: Synthetic oligonucleotide
  misc_feature 1..20: note = Target: ANGPTL4; (-) strand; PAM type: YTN; PAM sequence: TTC
  source 1..20: mol_type = other DNA
tctccctcattcattcattc

SEQ ID NO: 13817 - DNA, 20 bp, synthetic construct
  misc_feature 1..20: note = Description of Artificial Sequence: Synthetic oligonucleotide
  misc_feature 1..20: note = Target: ANGPTL4; (-) strand; PAM type: YTN; PAM sequence: TTT
  source 1..20: mol_type = other DNA
ctctccctcattcattcatt

SEQ ID NO: 13818 - DNA, 20 bp, synthetic construct
  misc_feature 1..20: note = Description of Artificial Sequence: Synthetic oligonucleotide
  misc_feature 1..20: note = Target: ANGPTL4; (-) strand; PAM type: YTN; PAM sequence: CTT
  source 1..20: mol_type = other DNA
tctctccctcattcattcat

SEQ ID NO: 13819 - DNA, 20 bp, synthetic construct
  misc_feature 1..20: note = Description of Artificial Sequence: Synthetic oligonucleotide
  misc_feature 1..20: note = Target: ANGPTL4; (-) strand; PAM type: YTN; PAM sequence: CTC
  source 1..20: mol_type = other DNA
tttctctccctcattcattc

SEQ ID NO: 13820 - DNA, 20 bp, synthetic construct
  misc_feature 1..20: note = Description of Artificial Sequence: Synthetic oligonucleotide
  misc_feature 1..20: note = Target: ANGPTL4; (-) strand; PAM type: YTN; PAM sequence: TTC
  source 1..20: mol_type = other DNA
ctctttctctccctcattca

SEQ ID NO: 13821 - DNA, 20 bp, synthetic construct
  misc_feature 1..20: note = Description of Artificial Sequence: Synthetic oligonucleotide
  misc_feature 1..20: note = Target: ANGPTL4; (-) strand; PAM type: YTN; PAM sequence: CTT
  source 1..20: mol_type = other DNA
cctctttctctccctcattc

SEQ ID NO: 13822 - DNA, 20 bp, synthetic construct
  misc_feature 1..20: note = Description of Artificial Sequence: Synthetic oligonucleotide
  misc_feature 1..20: note = Target: ANGPTL4; (-) strand; PAM type: YTN; PAM sequence: TTC
  source 1..20: mol_type = other DNA
agacatggaagaccttcctc

SEQ ID NO: 13823 - DNA, 20 bp, synthetic construct
  misc_feature 1..20: note = Description of Artificial Sequence: Synthetic oligonucleotide
  misc_feature 1..20: note = Target: ANGPTL4; (-) strand; PAM type: YTN; PAM sequence: TTT
  source 1..20: mol_type = other DNA
cagacatggaagaccttcct

SEQ ID NO: 13824 - DNA, 20 bp, synthetic construct
  misc_feature 1..20: note = Description of Artificial Sequence: Synthetic oligonucleotide
  misc_feature 1..20: note = Target: ANGPTL4; (-) strand; PAM type: YTN; PAM sequence: CTG
  source 1..20: mol_type = other DNA
tgtgtcaaaaaaaaaaaaaa

SEQ ID NO: 13825 - DNA, 20 bp, synthetic construct
  misc_feature 1..20: note = Description of Artificial Sequence: Synthetic oligonucleotide
  misc_feature 1..20: note = Target: ANGPTL4; (-) strand; PAM type: YTN; PAM sequence: CTG
  source 1..20: mol_type = other DNA
ggtgacagagtgagactgtg

SEQ ID NO: 13826 - DNA, 20 bp, synthetic construct
  misc_feature 1..20: note = Description of Artificial Sequence: Synthetic oligonucleotide
  misc_feature 1..20: note = Target: ANGPTL4; (-) strand; PAM type: YTN; PAM sequence: CTC
  source 1..20: mol_type = other DNA
cagcctgggtgacagagtga

SEQ ID NO: 13827 - DNA, 20 bp, synthetic construct
  misc_feature 1..20: note = Description of Artificial Sequence: Synthetic oligonucleotide
  misc_feature 1..20: note = Target: ANGPTL4; (-) strand; PAM type: YTN; PAM sequence: TTG
  source 1..20: mol_type = other DNA
caccacagcactccagcctg

SEQ ID NO: 13828 - DNA, 20 bp, synthetic construct
  misc_feature 1..20: note = Description of Artificial Sequence: Synthetic oligonucleotide
  misc_feature 1..20: note = Target: ANGPTL4; (-) strand; PAM type: YTN; PAM sequence: CTG
  source 1..20: mol_type = other DNA
agattgcaccacagcactcc

SEQ ID NO: 13829 - DNA, 20 bp, synthetic construct
  misc_feature 1..20: note = Description of Artificial Sequence: Synthetic oligonucleotide
  misc_feature 1..20: note = Target: ANGPTL4; (-) strand; PAM type: YTN; PAM sequence: TTG
  source 1..20: mol_type = other DNA
cagtgagctgagattgcacc

SEQ ID NO: 13830 - DNA, 20 bp, synthetic construct
  misc_feature 1..20: note = Description of Artificial Sequence: Synthetic oligonucleotide
  misc_feature 1..20: note = Target: ANGPTL4; (-) strand; PAM type: YTN; PAM sequence: CTC
  source 1..20: mol_type = other DNA
aggagacggaggttgcagtg

SEQ ID NO: 13831 - DNA, 20 bp, synthetic construct
  misc_feature 1..20: note = Description of Artificial Sequence: Synthetic oligonucleotide
  misc_feature 1..20: note = Target: ANGPTL4; (-) strand; PAM type: YTN; PAM sequence: TTG
  source 1..20: mol_type = other DNA
aactcaggagacggaggttg

SEQ ID NO: 13832 - DNA, 20 bp, synthetic construct
  misc_feature 1..20: note = Description of Artificial Sequence: Synthetic oligonucleotide
  misc_feature 1..20: note = Target: ANGPTL4; (-) strand; PAM type: YTN; PAM sequence: CTT
  source 1..20: mol_type = other DNA
gaactcaggagacggaggtt

SEQ ID NO: 13833 - DNA, 20 bp, synthetic construct
  misc_feature 1..20: note = Description of Artificial Sequence: Synthetic oligonucleotide
  misc_feature 1..20: note = Target: ANGPTL4; (-) strand; PAM type: YTN; PAM sequence: CTG
  source 1..20: mol_type = other DNA
tgtcaggagaatcgcttgaa

SEQ ID NO: 13834 - DNA, 20 bp, synthetic construct
  misc_feature 1..20: note = Description of Artificial Sequence: Synthetic oligonucleotide
  misc_feature 1..20: note = Target: ANGPTL4; (-) strand; PAM type: YTN; PAM sequence: CTC
  source 1..20: mol_type = other DNA
gggagactgtgtcaggagaa

SEQ ID NO: 13835 - DNA, 20 bp, synthetic construct
  misc_feature 1..20: note = Description of Artificial Sequence: Synthetic oligonucleotide
  misc_feature 1..20: note = Target: ANGPTL4; (-) strand; PAM type: YTN; PAM sequence: CTA
  source 1..20: mol_type = other DNA
ctcgggagactgtgtcagga

SEQ ID NO: 13836 - DNA, 20 bp, synthetic construct
  misc_feature 1..20: note = Description of Artificial Sequence: Synthetic oligonucleotide
  misc_feature 1..20: note = Target: ANGPTL4; (-) strand; PAM type: YTN; PAM sequence: TTA
  source 1..20: mol_type = other DNA
cagctactcgggagactgtg

SEQ ID NO: 13837 - DNA, 20 bp, synthetic construct
  misc_feature 1..20: note = Description of Artificial Sequence: Synthetic oligonucleotide
  misc_feature 1..20: note = Target: ANGPTL4; (-) strand; PAM type: YTN; PAM sequence: CTT
  source 1..20: mol_type = other DNA
acagctactcgggagactgt

SEQ ID NO: 13838 - DNA, 20 bp, synthetic construct
  misc_feature 1..20: note = Description of Artificial Sequence: Synthetic oligonucleotide
  misc_feature 1..20: note = Target: ANGPTL4; (-) strand; PAM type: YTN; PAM sequence: TTA
  source 1..20: mol_type = other DNA
gccgggtgtggtggcacgtg

SEQ ID NO: 13839 - DNA, 20 bp, synthetic construct
  misc_feature 1..20: note = Description of Artificial Sequence: Synthetic oligonucleotide
  misc_feature 1..20: note = Target: ANGPTL4; (-) strand; PAM type: YTN; PAM sequence: CTA
  source 1..20: mol_type = other DNA
aaaataaaaaattagccggg

SEQ ID NO: 13840 - DNA, 20 bp, synthetic construct
  misc_feature 1..20: note = Description of Artificial Sequence: Synthetic oligonucleotide
  misc_feature 1..20: note = Target: ANGPTL4; (-) strand; PAM type: YTN; PAM sequence: CTA
  source 1..20: mol_type = other DNA
ctaaaaataaaaaattagcc

SEQ ID NO: 13841 - DNA, 20 bp, synthetic construct
  misc_feature 1..20: note = Description of Artificial Sequence: Synthetic oligonucleotide
  misc_feature 1..20: note = Target: ANGPTL4; (-) strand; PAM type: YTN; PAM sequence: CTC
  source 1..20: mol_type = other DNA
tactaaaaataaaaaattag

SEQ ID NO: 13842 - DNA, 20 bp, synthetic construct
  misc_feature 1..20: note = Description of Artificial Sequence: Synthetic oligonucleotide
  misc_feature 1..20: note = Target: ANGPTL4; (-) strand; PAM type: YTN; PAM sequence: CTC
  source 1..20: mol_type = other DNA
gtctctactaaaaataaaaa

SEQ ID NO: 13843 - DNA, 20 bp, synthetic construct
  misc_feature 1..20: note = Description of Artificial Sequence: Synthetic oligonucleotide
  misc_feature 1..20: note = Target: ANGPTL4; (-) strand; PAM type: YTN; PAM sequence: CTG
  source 1..20: mol_type = other DNA
gccaacatggtgaaacctcg

SEQ ID NO: 13844 - DNA, 20 bp, synthetic construct
  misc_feature 1..20: note = Description of Artificial Sequence: Synthetic oligonucleotide
  misc_feature 1..20: note = Target: ANGPTL4; (-) strand; PAM type: YTN; PAM sequence: TTC
  source 1..20: mol_type = other DNA
gagatcagcctggccaacat

SEQ ID NO: 13845 - DNA, 20 bp, synthetic construct
  misc_feature 1..20: note = Description of Artificial Sequence: Synthetic oligonucleotide
  misc_feature 1..20: note = Target: ANGPTL4; (-) strand; PAM type: YTN; PAM sequence: CTG
  source 1..20: mol_type = other DNA
aggtcaggggttcgagatca

SEQ ID NO: 13846 - DNA, 20 bp, synthetic construct
  misc_feature 1..20: note = Description of Artificial Sequence: Synthetic oligonucleotide
  misc_feature 1..20: note = Target: ANGPTL4; (-) strand; PAM type: YTN; PAM sequence: TTG
  source 1..20: mol_type = other DNA
ggaggccgggtggtgggagg

SEQ ID NO: 13847 - DNA, 20 bp, synthetic construct
  misc_feature 1..20: note = Description of Artificial Sequence: Synthetic oligonucleotide
  misc_feature 1..20: note = Target: ANGPTL4; (-) strand; PAM type: YTN; PAM sequence: TTT
  source 1..20: mol_type = other DNA
gggaggccgggtggtgggag

SEQ ID NO: 13848 - DNA, 20 bp, synthetic construct
  misc_feature 1..20: note = Description of Artificial Sequence: Synthetic oligonucleotide
  misc_feature 1..20: note = Target: ANGPTL4; (-) strand; PAM type: YTN; PAM sequence: CTT
  source 1..20: mol_type = other DNA
tgggaggccgggtggtggga

SEQ ID NO: 13849 - DNA, 20 bp, synthetic construct
  misc_feature 1..20: note = Description of Artificial Sequence: Synthetic oligonucleotide
  misc_feature 1..20: note = Target: ANGPTL4; (-) strand; PAM type: YTN; PAM sequence: CTG
  source 1..20: mol_type = other DNA
taatcccagcactttgggag

SEQ ID NO: 13850 - DNA, 20 bp, synthetic construct
  misc_feature 1..20: note = Description of Artificial Sequence: Synthetic oligonucleotide
  misc_feature 1..20: note = Target: ANGPTL4; (-) strand; PAM type: YTN; PAM sequence: CTC
  source 1..20: mol_type = other DNA
acgcctgtaatcccagcact

SEQ ID NO: 13851 - DNA, 20 bp, synthetic construct
  misc_feature 1..20: note = Description of Artificial Sequence: Synthetic oligonucleotide
  misc_feature 1..20: note = Target: ANGPTL4; (-) strand; PAM type: YTN; PAM sequence: CTG
  source 1..20: mol_type = other DNA
tggccaggcgcggtggctca

SEQ ID NO: 13852 - DNA, 20 bp, synthetic construct
  misc_feature 1..20: note = Description of Artificial Sequence: Synthetic oligonucleotide
  misc_feature 1..20: note = Target: ANGPTL4; (-) strand; PAM type: YTN; PAM sequence: CTA
  source 1..20: mol_type = other DNA
aaaaagaaataaaataaaag

SEQ ID NO: 13853 - DNA, 20 bp, synthetic construct
  misc_feature 1..20: note = Description of Artificial Sequence: Synthetic oligonucleotide
  misc_feature 1..20: note = Target: ANGPTL4; (-) strand; PAM type: YTN; PAM sequence: CTC
  source 1..20: mol_type = other DNA
taaaaaagaaataaaataaa

SEQ ID NO: 13854 - DNA, 20 bp, synthetic construct
  misc_feature 1..20: note = Description of Artificial Sequence: Synthetic oligonucleotide
  misc_feature 1..20: note = Target: ANGPTL4; (-) strand; PAM type: YTN; PAM sequence: CTG
  source 1..20: mol_type = other DNA
tctctaaaaaagaaataaaa

SEQ ID NO: 13855 - DNA, 20 bp, synthetic construct
  misc_feature 1..20: note = Description of Artificial Sequence: Synthetic oligonucleotide
  misc_feature 1..20: note = Target: ANGPTL4; (-) strand; PAM type: YTN; PAM sequence: CTG
  source 1..20: mol_type = other DNA
ggcaacagagtgagatcctg

SEQ ID NO: 13856 - DNA, 20 bp, synthetic construct
  misc_feature 1..20: note = Description of Artificial Sequence: Synthetic oligonucleotide
  misc_feature 1..20: note = Target: ANGPTL4; (-) strand; PAM type: YTN; PAM sequence: CTC
  source 1..20: mol_type = other DNA
cagcctgggcaacagagtga

SEQ ID NO: 13857 - DNA, 20 bp, synthetic construct
  misc_feature 1..20: note = Description of Artificial Sequence: Synthetic oligonucleotide
  misc_feature 1..20: note = Target: ANGPTL4; (-) strand; PAM type: YTN; PAM sequence: CTG
  source 1..20: mol_type = other DNA
cactccagcctgggcaacag

SEQ ID NO: 13858 - DNA, 20 bp, synthetic construct
  misc_feature 1..20: note = Description of Artificial Sequence: Synthetic oligonucleotide
  misc_feature 1..20: note = Target: ANGPTL4; (-) strand; PAM type: YTN; PAM sequence: CTG
  source 1..20: mol_type = other DNA
cagtgagccacaatggtgcc

SEQ ID NO: 13859 - DNA, 20 bp, synthetic construct
  misc_feature 1..20: note = Description of Artificial Sequence: Synthetic oligonucleotide
  misc_feature 1..20: note = Target: ANGPTL4; (-) strand; PAM type: YTN; PAM sequence: TTG
  source 1..20: mol_type = other DNA
agcccaggaggtagaggctg

SEQ ID NO: 13860 - DNA, 20 bp, synthetic construct
  misc_feature 1..20: note = Description of Artificial Sequence: Synthetic oligonucleotide
  misc_feature 1..20: note = Target: ANGPTL4; (-) strand; PAM type: YTN; PAM sequence: CTT
  source 1..20: mol_type = other DNA
gagcccaggaggtagaggct

SEQ ID NO: 13861 - DNA, 20 bp, synthetic construct
  misc_feature 1..20: note = Description of Artificial Sequence: Synthetic oligonucleotide
  misc_feature 1..20: note = Target: ANGPTL4; (-) strand; PAM type: YTN; PAM sequence: CTC
  source 1..20: mol_type = other DNA
acttgagcccaggaggtaga

SEQ ID NO: 13862 - DNA, 20 bp, synthetic construct
  misc_feature 1..20: note = Description of Artificial Sequence: Synthetic oligonucleotide
  misc_feature 1..20: note = Target: ANGPTL4; (-) strand; PAM type: YTN; PAM sequence: CTG
  source 1..20: mol_type = other DNA
aggtgggaggctcacttgag

SEQ ID NO: 13863 - DNA, 20 bp, synthetic construct
  misc_feature 1..20: note = Description of Artificial Sequence: Synthetic oligonucleotide
  misc_feature 1..20: note = Target: ANGPTL4; (-) strand; PAM type: YTN; PAM sequence: TTG
  source 1..20: mol_type = other DNA
ggagcctgaggtgggaggct

SEQ ID NO: 13864 - DNA, 20 bp, synthetic construct
  misc_feature 1..20: note = Description of Artificial Sequence: Synthetic oligonucleotide
  misc_feature 1..20: note = Target: ANGPTL4; (-) strand; PAM type: YTN; PAM sequence: CTT
  source 1..20: mol_type = other DNA
gggagcctgaggtgggaggc

SEQ ID NO: 13865 - DNA, 20 bp, synthetic construct
  misc_feature 1..20: note = Description of Artificial Sequence: Synthetic oligonucleotide
  misc_feature 1..20: note = Target: ANGPTL4; (-) strand; PAM type: YTN; PAM sequence: CTA
  source 1..20: mol_type = other DNA
cttgggagcctgaggtggga

SEQ ID NO: 13866 - DNA, 20 bp, synthetic construct
  misc_feature 1..20: note = Description of Artificial Sequence: Synthetic oligonucleotide
  misc_feature 1..20: note = Target: ANGPTL4; (-) strand; PAM type: YTN; PAM sequence: CTG
  source 1..20: mol_type = other DNA
tggtcgcagctacttgggag

SEQ ID NO: 13867 - DNA, 20 bp, synthetic construct
  misc_feature 1..20: note = Description of Artificial Sequence: Synthetic oligonucleotide
  misc_feature 1..20: note = Target: ANGPTL4; (-) strand; PAM type: YTN; PAM sequence: TTA
  source 1..20: mol_type = other DNA
gagaacagaaagaggagaca

SEQ ID NO: 13868 - DNA, 20 bp, synthetic construct
  misc_feature 1..20: note = Description of Artificial Sequence: Synthetic oligonucleotide
  misc_feature 1..20: note = Target: ANGPTL4; (-) strand; PAM type: YTN; PAM sequence: CTT
  source 1..20: mol_type = other DNA
agagaacagaaagaggagac

SEQ ID NO: 13869 - DNA, 20 bp, synthetic construct
  misc_feature 1..20: note = Description of Artificial Sequence: Synthetic oligonucleotide
  misc_feature 1..20: note = Target: ANGPTL4; (-) strand; PAM type: YTN; PAM sequence: CTA
  source 1..20: mol_type = other DNA
taataaagcaggaacttaga

SEQ ID NO: 13870 - DNA, 20 bp, synthetic construct
  misc_feature 1..20: note = Description of Artificial Sequence: Synthetic oligonucleotide
  misc_feature 1..20: note = Target: ANGPTL4; (-) strand; PAM type: YTN; PAM sequence: TTG
  source 1..20: mol_type = other DNA
cctataataaagcaggaact

SEQ ID NO: 13871 - DNA, 20 bp, synthetic construct
  misc_feature 1..20: note = Description of Artificial Sequence: Synthetic oligonucleotide
  misc_feature 1..20: note = Target: ANGPTL4; (-) strand; PAM type: YTN; PAM sequence: TTT
  source 1..20: mol_type = other DNA
gcctataataaagcaggaac

SEQ ID NO: 13872 - DNA, 20 bp, synthetic construct
  misc_feature 1..20: note = Description of Artificial Sequence: Synthetic oligonucleotide
  misc_feature 1..20: note = Target: ANGPTL4; (-) strand; PAM type: YTN; PAM sequence: CTT
  source 1..20: mol_type = other DNA
tgcctataataaagcaggaa

SEQ ID NO: 13873 - DNA, 20 bp, synthetic construct
  misc_feature 1..20: note = Description of Artificial Sequence: Synthetic oligonucleotide
  misc_feature 1..20: note = Target: ANGPTL4; (-) strand; PAM type: YTN; PAM sequence: CTG
  source 1..20: mol_type = other DNA
agctttgcctataataaagc

SEQ ID NO: 13874 - DNA, 20 bp, synthetic construct
  misc_feature 1..20: note = Description of Artificial Sequence: Synthetic oligonucleotide
  misc_feature 1..20: note = Target: ANGPTL4; (-) strand; PAM type: YTN; PAM sequence: TTA
  source 1..20: mol_type = other DNA
atgtcctgagctttgcctat

SEQ ID NO: 13875 - DNA, 20 bp, synthetic construct
  misc_feature 1..20: note = Description of Artificial Sequence: Synthetic oligonucleotide
  misc_feature 1..20: note = Target: ANGPTL4; (-) strand; PAM type: YTN; PAM sequence: TTT
  source 1..20: mol_type = other DNA
aatgtcctgagctttgccta

SEQ ID NO: 13876 - DNA, 20 bp, synthetic construct
  misc_feature 1..20: note = Description of Artificial Sequence: Synthetic oligonucleotide
  misc_feature 1..20: note = Target: ANGPTL4; (-) strand; PAM type: YTN; PAM sequence: CTT
  source 1..20: mol_type = other DNA
taatgtcctgagctttgcct

SEQ ID NO: 13877 - DNA, 20 bp, synthetic construct
  misc_feature 1..20: note = Description of Artificial Sequence: Synthetic oligonucleotide
  misc_feature 1..20: note = Target: ANGPTL4; (-) strand; PAM type: YTN; PAM sequence: CTA
  source 1..20: mol_type = other DNA
ccgccagggtctttaatgtc

SEQ ID NO: 13878 - DNA, 20 bp, synthetic construct
  misc_feature 1..20: note = Description of Artificial Sequence: Synthetic oligonucleotide
  misc_feature 1..20: note = Target: ANGPTL4; (-) strand; PAM type: YTN; PAM sequence: CTC
  source 1..20: mol_type = other DNA
taccgccagggtctttaatg

SEQ ID NO: 13879 - DNA, 20 bp, synthetic construct
  misc_feature 1..20: note = Description of Artificial Sequence: Synthetic oligonucleotide
  misc_feature 1..20: note = Target: ANGPTL4; (-) strand; PAM type: YTN; PAM sequence: CTA
  source 1..20: mol_type = other DNA
ccctctaccgccagggtctt

SEQ ID NO: 13880 - DNA, 20 bp, synthetic construct
  misc_feature 1..20: note = Description of Artificial Sequence: Synthetic oligonucleotide
  misc_feature 1..20: note = Target: ANGPTL4; (-) strand; PAM type: YTN; PAM sequence: CTC
  source 1..20: mol_type = other DNA
acccccatagcctaccctct

SEQ ID NO: 13881 - DNA, 20 bp, synthetic construct
  misc_feature 1..20: note = Description of Artificial Sequence: Synthetic oligonucleotide
  misc_feature 1..20: note = Target: ANGPTL4; (-) strand; PAM type: YTN; PAM sequence: TTG
  source 1..20: mol_type = other DNA
gatcagggcctcacccccat

SEQ ID NO: 13882 - DNA, 20 bp, synthetic construct
  misc_feature 1..20: note = Description of Artificial Sequence: Synthetic oligonucleotide
  misc_feature 1..20: note = Target: ANGPTL4; (-) strand; PAM type: YTN; PAM sequence: CTT
  source 1..20: mol_type = other DNA
ggatcagggcctcaccccca

SEQ ID NO: 13883 - DNA, 20 bp, synthetic construct
  misc_feature 1..20: note = Description of Artificial Sequence: Synthetic oligonucleotide
  misc_feature 1..20: note = Target: ANGPTL4; (-) strand; PAM type: YTN; PAM sequence: TTA
  source 1..20: mol_type = other DNA
gcggcaggacttggatcagg

SEQ ID NO: 13884 - DNA, 20 bp, synthetic construct
  misc_feature 1..20: note = Description of Artificial Sequence: Synthetic oligonucleotide
  misc_feature 1..20: note = Target: ANGPTL4; (-) strand; PAM type: YTN; PAM sequence: CTT
  source 1..20: mol_type = other DNA
agcggcaggacttggatcag

SEQ ID NO: 13885 - DNA, 20 bp, synthetic construct
  misc_feature 1..20: note = Description of Artificial Sequence: Synthetic oligonucleotide
  misc_feature 1..20: note = Target: ANGPTL4; (-) strand; PAM type: YTN; PAM sequence: TTA
  source 1..20: mol_type = other DNA
tgagtgccttagcggcagga

SEQ ID NO: 13886 - DNA, 20 bp, synthetic construct
  misc_feature 1..20: note = Description of Artificial Sequence: Synthetic oligonucleotide
  misc_feature 1..20: note = Target: ANGPTL4; (-) strand; PAM type: YTN; PAM sequence: CTG
  source 1..20: mol_type = other DNA
agcccgaaattatgagtgcc

SEQ ID NO: 13887 - DNA, 20 bp, synthetic construct
  misc_feature 1..20: note = Description of Artificial Sequence: Synthetic oligonucleotide
  misc_feature 1..20: note = Target: ANGPTL4; (-) strand; PAM type: YTN; PAM sequence: CTC
  source 1..20: mol_type = other DNA
ccctgagcccgaaattatga

SEQ ID NO: 13888 - DNA, 20 bp, synthetic construct
  misc_feature 1..20: note = Description of Artificial Sequence: Synthetic oligonucleotide
  misc_feature 1..20: note = Target: ANGPTL4; (-) strand; PAM type: YTN; PAM sequence: TTC
  source 1..20: mol_type = other DNA
tcccctgagcccgaaattat

SEQ ID NO: 13889 - DNA, 20 bp, synthetic construct
  misc_feature 1..20: note = Description of Artificial Sequence: Synthetic oligonucleotide
  misc_feature 1..20: note = Target: ANGPTL4; (-) strand; PAM type: YTN; PAM sequence: TTT
  source 1..20: mol_type = other DNA
ctcccctgagcccgaaatta

SEQ ID NO: 13890 - DNA, 20 bp, synthetic construct
  misc_feature 1..20: note = Description of Artificial Sequence: Synthetic oligonucleotide
  misc_feature 1..20: note = Target: ANGPTL4; (-) strand; PAM type: YTN; PAM sequence: TTC
  source 1..20: mol_type = other DNA
catttctcccctgagcccga

SEQ ID NO: 13891 - DNA, 20 bp, synthetic construct
  misc_feature 1..20: note = Description of Artificial Sequence: Synthetic oligonucleotide
  misc_feature 1..20: note = Target: ANGPTL4; (-) strand; PAM type: YTN; PAM sequence: CTT
  source 1..20: mol_type = other DNA
ccatttctcccctgagcccg

SEQ ID NO: 13892 - DNA, 20 bp, synthetic construct
  misc_feature 1..20: note = Description of Artificial Sequence: Synthetic oligonucleotide
  misc_feature 1..20: note = Target: ANGPTL4; (-) strand; PAM type: YTN; PAM sequence: TTG
  source 1..20: mol_type = other DNA
acttccatttctcccctgag

SEQ ID NO: 13893 - DNA, 20 bp, synthetic construct
  misc_feature 1..20: note = Description of Artificial Sequence: Synthetic oligonucleotide
  misc_feature 1..20: note = Target: ANGPTL4; (-) strand; PAM type: YTN; PAM sequence: TTT
  source 1..20: mol_type = other DNA
gacttccatttctcccctga

SEQ ID NO: 13894 - DNA, 20 bp, synthetic construct
  misc_feature 1..20: note = Description of Artificial Sequence: Synthetic oligonucleotide
  misc_feature 1..20: note = Target: ANGPTL4; (-) strand; PAM type: YTN; PAM sequence: CTT
  source 1..20: mol_type = other DNA
tgacttccatttctcccctg

SEQ ID NO: 13895 - DNA, 20 bp, synthetic construct
  misc_feature 1..20: note = Description of Artificial Sequence: Synthetic oligonucleotide
  misc_feature 1..20: note = Target: ANGPTL4; (-) strand; PAM type: YTN; PAM sequence: TTC
  source 1..20: mol_type = other DNA
tttgacttccatttctcccc

SEQ ID NO: 13896 - DNA, 20 bp, synthetic construct
  misc_feature 1..20: note = Description of Artificial Sequence: Synthetic oligonucleotide
  misc_feature 1..20: note = Target: ANGPTL4; (-) strand; PAM type: YTN; PAM sequence: TTA
  source 1..20: mol_type = other DNA
tgagattctttgacttccat

SEQ ID NO: 13897 - DNA, 20 bp, synthetic construct
  misc_feature 1..20: note = Description of Artificial Sequence: Synthetic oligonucleotide
  misc_feature 1..20: note = Target: ANGPTL4; (-) strand; PAM type: YTN; PAM sequence: TTT
  source 1..20: mol_type = other DNA
atgagattctttgacttcca

SEQ ID NO: 13898 - DNA, 20 bp, synthetic construct
  misc_feature 1..20: note = Description of Artificial Sequence: Synthetic oligonucleotide
  misc_feature 1..20: note = Target: ANGPTL4; (-) strand; PAM type: YTN; PAM sequence: CTG
  source 1..20: mol_type = other DNA
tgtttatgagattctttgac

SEQ ID NO: 13899 - DNA, 20 bp, synthetic construct
  misc_feature 1..20: note = Description of Artificial Sequence: Synthetic oligonucleotide
  misc_feature 1..20: note = Target: ANGPTL4; (-) strand; PAM type: YTN; PAM sequence: TTC
  source 1..20: mol_type = other DNA
gtcatcgcagctgtgtttat

SEQ ID NO: 13900 - DNA, 20 bp, synthetic construct
  misc_feature 1..20: note = Description of Artificial Sequence: Synthetic oligonucleotide
  misc_feature 1..20: note = Target: ANGPTL4; (-) strand; PAM type: YTN; PAM sequence: TTC
  source 1..20: mol_type = other DNA
ccgtgaaagggttcgtcatc

SEQ ID NO: 13901 - DNA, 20 bp, synthetic construct
  misc_feature 1..20: note = Description of Artificial Sequence: Synthetic oligonucleotide
  misc_feature 1..20: note = Target: ANGPTL4; (-) strand; PAM type: YTN; PAM sequence: CTT
  source 1..20: mol_type = other DNA
cccgtgaaagggttcgtcat

SEQ ID NO: 13902 - DNA, 20 bp, synthetic construct
  misc_feature 1..20: note = Description of Artificial Sequence: Synthetic oligonucleotide
  misc_feature 1..20: note = Target: ANGPTL4; (-) strand; PAM type: YTN; PAM sequence: TTC
  source 1..20: mol_type = other DNA
cttcccgtgaaagggttcgt

SEQ ID NO: 13903 - DNA, 20 bp, synthetic construct
  misc_feature 1..20: note = Description of Artificial Sequence: Synthetic oligonucleotide
  misc_feature 1..20: note = Target: ANGPTL4; (-) strand; PAM type: YTN; PAM sequence: CTC
  source 1..20: mol_type = other DNA
gcatgttccttcccgtgaaa

SEQ ID NO: 13904 - DNA, 20 bp, synthetic construct
  misc_feature 1..20: note = Description of Artificial Sequence: Synthetic oligonucleotide
  misc_feature 1..20: note = Target: ANGPTL4; (-) strand; PAM type: YTN; PAM sequence: CTG
  source 1..20: mol_type = other DNA
ggctcgcatgttccttcccg

SEQ ID NO: 13905 - DNA, 20 bp, synthetic construct
  misc_feature 1..20: note = Description of Artificial Sequence: Synthetic oligonucleotide
  misc_feature 1..20: note = Target: ANGPTL4; (-) strand; PAM type: YTN; PAM sequence: TTC
  source 1..20: mol_type = other DNA
tgggctcgcatgttccttcc

SEQ ID NO: 13906 - DNA, 20 bp, synthetic construct
  misc_feature 1..20: note = Description of Artificial Sequence: Synthetic oligonucleotide
  misc_feature 1..20: note = Target: ANGPTL4; (-) strand; PAM type: YTN; PAM sequence: TTT
  source 1..20: mol_type = other DNA
ctgggctcgcatgttccttc

SEQ ID NO: 13907 - DNA, 20 bp, synthetic construct
  misc_feature 1..20: note = Description of Artificial Sequence: Synthetic oligonucleotide
  misc_feature 1..20: note = Target: ANGPTL4; (-) strand; PAM type: YTN; PAM sequence: TTT
  source 1..20: mol_type = other DNA
tctgggctcgcatgttcctt

SEQ ID NO: 13908 - DNA, 20 bp, synthetic construct
  misc_feature 1..20: note = Description of Artificial Sequence: Synthetic oligonucleotide
  misc_feature 1..20: note = Target: ANGPTL4; (-) strand; PAM type: YTN; PAM sequence: CTT
  source 1..20: mol_type = other DNA
ttctgggctcgcatgttcct

SEQ ID NO: 13909 - DNA, 20 bp, synthetic construct
  misc_feature 1..20: note = Description of Artificial Sequence: Synthetic oligonucleotide
  misc_feature 1..20: note = Target: ANGPTL4; (-) strand; PAM type: YTN; PAM sequence: CTC
  source 1..20: mol_type = other DNA
catcccaagaccaggagaga

SEQ ID NO: 13910 - DNA, 20 bp, synthetic construct
  misc_feature 1..20: note = Description of Artificial Sequence: Synthetic oligonucleotide
  misc_feature 1..20: note = Target: ANGPTL4; (-) strand; PAM type: YTN; PAM sequence: TTC
  source 1..20: mol_type = other DNA
gtgtgacctccatcccaaga

SEQ ID NO: 13911 - DNA, 20 bp, synthetic construct
  misc_feature 1..20: note = Description of Artificial Sequence: Synthetic oligonucleotide
  misc_feature 1..20: note = Target: ANGPTL4; (-) strand; PAM type: YTN; PAM sequence: CTT
  source 1..20: mol_type = other DNA
cgtgtgacctccatcccaag

SEQ ID NO: 13912 - DNA, 20 bp, synthetic construct
  misc_feature 1..20: note = Description of Artificial Sequence: Synthetic oligonucleotide
  misc_feature 1..20: note = Target: ANGPTL4; (-) strand; PAM type: YTN; PAM sequence: TTG
  source 1..20: mol_type = other DNA
cggaggcttcgtgtgacctc

SEQ ID NO: 13913 - DNA, 20 bp, synthetic construct
  misc_feature 1..20: note = Description of Artificial Sequence: Synthetic oligonucleotide
  misc_feature 1..20: note = Target: ANGPTL4; (-) strand; PAM type: YTN; PAM sequence: CTT
  source 1..20: mol_type = other DNA
gcggaggcttcgtgtgacct

SEQ ID NO: 13914 - DNA, 20 bp, synthetic construct
  misc_feature 1..20: note = Description of Artificial Sequence: Synthetic oligonucleotide
  misc_feature 1..20: note = Target: ANGPTL4; (-) strand; PAM type: YTN; PAM sequence: TTG
  source 1..20: mol_type = other DNA
ccttgcggaggcttcgtgtg

SEQ ID NO: 13915 - DNA, 20 bp, synthetic construct
  misc_feature 1..20: note = Description of Artificial Sequence: Synthetic oligonucleotide
  misc_feature 1..20: note = Target: ANGPTL4; (-) strand; PAM type: YTN; PAM sequence: CTT
  source 1..20: mol_type = other DNA
gccttgcggaggcttcgtgt

SEQ ID NO: 13916 - DNA, 20 bp, synthetic construct
  misc_feature 1..20: note = Description of Artificial Sequence: Synthetic oligonucleotide
  misc_feature 1..20: note = Target: ANGPTL4; (-) strand; PAM type: YTN; PAM sequence: CTC
  source 1..20: mol_type = other DNA
accaaaagtccttgccttgc

SEQ ID NO: 13917 - DNA, 20 bp, synthetic construct
  misc_feature 1..20: note = Description of Artificial Sequence: Synthetic oligonucleotide
  misc_feature 1..20: note = Target: ANGPTL4; (-) strand; PAM type: YTN; PAM sequence: TTC
  source 1..20: mol_type = other DNA
agcggagcccggaactcacc

SEQ ID NO: 13918 - DNA, 20 bp, synthetic construct
  misc_feature 1..20: note = Description of Artificial Sequence: Synthetic oligonucleotide
  misc_feature 1..20: note = Target: ANGPTL4; (-) strand; PAM type: YTN; PAM sequence: CTG
  source 1..20: mol_type = other DNA
agttcagcggagcccggaac

SEQ ID NO: 13919 - DNA, 20 bp, synthetic construct
  misc_feature 1..20: note = Description of Artificial Sequence: Synthetic oligonucleotide
  misc_feature 1..20: note = Target: ANGPTL4; (-) strand; PAM type: YTN; PAM sequence: CTC
  source 1..20: mol_type = other DNA
aaaatgaaagaagagaaaag

SEQ ID NO: 13920 - DNA, 20 bp, synthetic construct
  misc_feature 1..20: note = Description of Artificial Sequence: Synthetic oligonucleotide
  misc_feature 1..20: note = Target: ANGPTL4; (-) strand; PAM type: YTN; PAM sequence: CTG
  source 1..20: mol_type = other DNA
ggcgacagagccagagtacg

SEQ ID NO: 13921 - DNA, 20 bp, synthetic construct
  misc_feature 1..20: note = Description of Artificial Sequence: Synthetic oligonucleotide
  misc_feature 1..20: note = Target: ANGPTL4; (-) strand; PAM type: YTN; PAM sequence: CTC
  source 1..20: mol_type = other DNA
cagcctgggcgacagagcca

SEQ ID NO: 13922 - DNA, 20 bp, synthetic construct
  misc_feature 1..20: note = Description of Artificial Sequence: Synthetic oligonucleotide
  misc_feature 1..20: note = Target: ANGPTL4; (-) strand; PAM type: YTN; PAM sequence: TTG
  source 1..20: mol_type = other DNA
cgctccagcctgggcgacag

SEQ ID NO: 13923 - DNA, 20 bp, synthetic construct
  misc_feature 1..20: note = Description of Artificial Sequence: Synthetic oligonucleotide
  misc_feature 1..20: note = Target: ANGPTL4; (-) strand; PAM type: YTN; PAM sequence: TTG
  source 1..20: mol_type = other DNA
cagtgcgccgagatggcgcc

SEQ ID NO: 13924 - DNA, 20 bp, synthetic construct
  misc_feature 1..20: note = Description of Artificial Sequence: Synthetic oligonucleotide
  misc_feature 1..20: note = Target: ANGPTL4; (-) strand; PAM type: YTN; PAM sequence: TTG
  source 1..20: mol_type = other DNA
aacccgggaggtggaggttg

SEQ ID NO: 13925 - DNA, 20 bp, synthetic construct
  misc_feature 1..20: note = Description of Artificial Sequence: Synthetic oligonucleotide
  misc_feature 1..20: note = Target: ANGPTL4; (-) strand; PAM type: YTN; PAM sequence: CTT
  source 1..20: mol_type = other DNA
gaacccgggaggtggaggtt

SEQ ID NO: 13926 - DNA, 20 bp, synthetic construct
  misc_feature 1..20: note = Description of Artificial Sequence: Synthetic oligonucleotide
  misc_feature 1..20: note = Target: ANGPTL4; (-) strand; PAM type: YTN; PAM sequence: CTG
  source 1..20: mol_type = other DNA
aggcagtagaatcgcttgaa

SEQ ID NO: 13927 - DNA, 20 bp, synthetic construct
  misc_feature 1..20: note = Description of Artificial Sequence: Synthetic oligonucleotide
  misc_feature 1..20: note = Target: ANGPTL4; (-) strand; PAM type: YTN; PAM sequence: CTC
  source 1..20: mol_type = other DNA
gggaggctgaggcagtagaa

SEQ ID NO: 13928 - DNA, 20 bp, synthetic construct
  misc_feature 1..20: note = Description of Artificial Sequence: Synthetic oligonucleotide
  misc_feature 1..20: note = Target: ANGPTL4; (-) strand; PAM type: YTN; PAM sequence: CTA
  source 1..20: mol_type = other DNA
ctcgggaggctgaggcagta

SEQ ID NO: 13929 - DNA, 20 bp, synthetic construct
  misc_feature 1..20: note = Description of Artificial Sequence: Synthetic oligonucleotide
  misc_feature 1..20: note = Target: ANGPTL4; (-) strand; PAM type: YTN; PAM sequence: CTG
  source 1..20: mol_type = other DNA
tagtcccagctactcgggag

SEQ ID NO: 13930 - DNA, 20 bp, synthetic construct
  misc_feature 1..20: note = Description of Artificial Sequence: Synthetic oligonucleotide
  misc_feature 1..20: note = Target: ANGPTL4; (-) strand; PAM type: YTN; PAM sequence: TTG
  source 1..20: mol_type = other DNA
gtagtgcgcgcctgtagtcc

SEQ ID NO: 13931 - DNA, 20 bp, synthetic construct
  misc_feature 1..20: note = Description of Artificial Sequence: Synthetic oligonucleotide
  misc_feature 1..20: note = Target: ANGPTL4; (-) strand; PAM type: YTN; PAM sequence: CTT
  source 1..20: mol_type = other DNA
ggtagtgcgcgcctgtagtc

SEQ ID NO: 13932 - DNA, 20 bp, synthetic construct
  misc_feature 1..20: note = Description of Artificial Sequence: Synthetic oligonucleotide
  misc_feature 1..20: note = Target: ANGPTL4; (-) strand; PAM type: YTN; PAM sequence: TTA
  source 1..20: mol_type = other DNA
gccgggcttggtagtgcgcg

SEQ ID NO: 13933 - DNA, 20 bp, synthetic construct
  misc_feature 1..20: note = Description of Artificial Sequence: Synthetic oligonucleotide
  misc_feature 1..20: note = Target: ANGPTL4; (-) strand; PAM type: YTN; PAM sequence: CTA
  source 1..20: mol_type = other DNA
aaaatacaaaaaaaaattag

SEQ ID NO: 13934 - DNA, 20 bp, synthetic construct
  misc_feature 1..20: note = Description of Artificial Sequence: Synthetic oligonucleotide
  misc_feature 1..20: note = Target: ANGPTL4; (-) strand; PAM type: YTN; PAM sequence: CTA
  source 1..20: mol_type = other DNA
ctaaaaatacaaaaaaaaat

SEQ ID NO: 13935 - DNA, 20 bp, synthetic construct
  misc_feature 1..20: note = Description of Artificial Sequence: Synthetic oligonucleotide
  misc_feature 1..20: note = Target: ANGPTL4; (-) strand; PAM type: YTN; PAM sequence: CTC
  source 1..20: mol_type = other DNA
tactaaaaatacaaaaaaaa

SEQ ID NO: 13936 - DNA, 20 bp, synthetic construct
  misc_feature 1..20: note = Description of Artificial Sequence: Synthetic oligonucleotide
  misc_feature 1..20: note = Target: ANGPTL4; (-) strand; PAM type: YTN; PAM sequence: TTC
  source 1..20: mol_type = other DNA
cagaccagcccggccaacat

SEQ ID NO: 13937 - DNA, 20 bp, synthetic construct
  misc_feature 1..20: note = Description of Artificial Sequence: Synthetic oligonucleotide
  misc_feature 1..20: note = Target: ANGPTL4; (-) strand; PAM type: YTN; PAM sequence: CTT
  source 1..20: mol_type = other DNA
ccagaccagcccggccaaca

SEQ ID NO: 13938 - DNA, 20 bp, synthetic construct
  misc_feature 1..20: note = Description of Artificial Sequence: Synthetic oligonucleotide
  misc_feature 1..20: note = Target: ANGPTL4; (-) strand; PAM type: YTN; PAM sequence: TTG
  source 1..20: mol_type = other DNA
aggtcaagacttccagacca

SEQ ID NO: 13939 - DNA, 20 bp, synthetic construct
  misc_feature 1..20: note = Description of Artificial Sequence: Synthetic oligonucleotide
  misc_feature 1..20: note = Target: ANGPTL4; (-) strand; PAM type: YTN; PAM sequence: CTT
  source 1..20: mol_type = other DNA
gaggtcaagacttccagacc

SEQ ID NO: 13940 - DNA, 20 bp, synthetic construct
  misc_feature 1..20: note = Description of Artificial Sequence: Synthetic oligonucleotide
  misc_feature 1..20: note = Target: ANGPTL4; (-) strand; PAM type: YTN; PAM sequence: TTA
  source 1..20: mol_type = other DNA
cccagtggcggagagggcgc

SEQ ID NO: 13941 - DNA, 20 bp, synthetic construct
  misc_feature 1..20: note = Description of Artificial Sequence: Synthetic oligonucleotide
  misc_feature 1..20: note = Target: ANGPTL4; (-) strand; PAM type: YTN; PAM sequence: CTT
  source 1..20: mol_type = other DNA
acccagtggcggagagggcg

SEQ ID NO: 13942 - DNA, 20 bp, synthetic construct
  misc_feature 1..20: note = Description of Artificial Sequence: Synthetic oligonucleotide
  misc_feature 1..20: note = Target: ANGPTL4; (-) strand; PAM type: YTN; PAM sequence: TTC
  source 1..20: mol_type = other DNA
cgcccccgccttacccagtg

SEQ ID NO: 13943 - DNA, 20 bp, synthetic construct
  misc_feature 1..20: note = Description of Artificial Sequence: Synthetic oligonucleotide
  misc_feature 1..20: note = Target: ANGPTL4; (-) strand; PAM type: YTN; PAM sequence: CTA
  source 1..20: mol_type = other DNA
ttccgcccccgccttaccca

SEQ ID NO: 13944 - DNA, 20 bp, synthetic construct
  misc_feature 1..20: note = Description of Artificial Sequence: Synthetic oligonucleotide
  misc_feature 1..20: note = Target: ANGPTL4; (-) strand; PAM type: YTN; PAM sequence: TTG
  source 1..20: mol_type = other DNA
caagccccctattccgcccc

SEQ ID NO: 13945 - DNA, 20 bp, synthetic construct
  misc_feature 1..20: note = Description of Artificial Sequence: Synthetic oligonucleotide
  misc_feature 1..20: note = Target: ANGPTL4; (-) strand; PAM type: YTN; PAM sequence: CTA
  source 1..20: mol_type = other DNA
gtgtgaaattgcaagccccc

SEQ ID NO: 13946 - DNA, 20 bp, synthetic construct
  misc_feature 1..20: note = Description of Artificial Sequence: Synthetic oligonucleotide
  misc_feature 1..20: note = Target: ANGPTL4; (-) strand; PAM type: YTN; PAM sequence: CTC
  source 1..20: mol_type = other DNA
tagtgtgaaattgcaagccc

SEQ ID NO: 13947 - DNA, 20 bp, synthetic construct
  misc_feature 1..20: note = Description of Artificial Sequence: Synthetic oligonucleotide
  misc_feature 1..20: note = Target: ANGPTL4; (-) strand; PAM type: YTN; PAM sequence: TTC
  source 1..20: mol_type = other DNA
ccccacggtgcccgcctcta

SEQ ID NO: 13948 - DNA, 20 bp, synthetic construct
  misc_feature 1..20: note = Description of Artificial Sequence: Synthetic oligonucleotide
  misc_feature 1..20: note = Target: ANGPTL4; (-) strand; PAM type: YTN; PAM sequence: TTT
  source 1..20: mol_type = other DNA
cccccacggtgcccgcctct

SEQ ID NO: 13949 - DNA, 20 bp, synthetic construct
  misc_feature 1..20: note = Description of Artificial Sequence: Synthetic oligonucleotide
  misc_feature 1..20: note = Target: ANGPTL4; (-) strand; PAM type: YTN; PAM sequence: CTT
  source 1..20: mol_type = other DNA
tcccccacggtgcccgcctc

SEQ ID NO: 13950 - DNA, 20 bp, synthetic construct
  misc_feature 1..20: note = Description of Artificial Sequence: Synthetic oligonucleotide
  misc_feature 1..20: note = Target: ANGPTL4; (-) strand; PAM type: YTN; PAM sequence: TTC
  source 1..20: mol_type = other DNA
tttcccccacggtgcccgcc

SEQ ID NO: 13951 - DNA, 20 bp, synthetic construct
  misc_feature 1..20: note = Description of Artificial Sequence: Synthetic oligonucleotide
  misc_feature 1..20: note = Target: ANGPTL4; (-) strand; PAM type: YTN; PAM sequence: CTT
  source 1..20: mol_type = other DNA
ctttcccccacggtgcccgc

SEQ ID NO: 13952 - DNA, 20 bp, synthetic construct
  misc_feature 1..20: note = Description of Artificial Sequence: Synthetic oligonucleotide
  misc_feature 1..20: note = Target: ANGPTL4; (-) strand; PAM type: YTN; PAM sequence: CTC
  source 1..20: mol_type = other DNA
ttctttcccccacggtgccc

SEQ ID NO: 13953 - DNA, 20 bp, synthetic construct
  misc_feature 1..20: note = Description of Artificial Sequence: Synthetic oligonucleotide
  misc_feature 1..20: note = Target: ANGPTL4; (-) strand; PAM type: YTN; PAM sequence: CTA
  source 1..20: mol_type = other DNA
cgaaccgtgggagacgtgac

SEQ ID NO: 13954 - DNA, 20 bp, synthetic construct
  misc_feature 1..20: note = Description of Artificial Sequence: Synthetic oligonucleotide
  misc_feature 1..20: note = Target: ANGPTL4; (-) strand; PAM type: YTN; PAM sequence: CTC
  source 1..20: mol_type = other DNA
tacgaaccgtgggagacgtg

SEQ ID NO: 13955 - DNA, 20 bp, synthetic construct
  misc_feature 1..20: note = Description of Artificial Sequence: Synthetic oligonucleotide
  misc_feature 1..20: note = Target: ANGPTL4; (-) strand; PAM type: YTN; PAM sequence: TTC
  source 1..20: mol_type = other DNA
ctctacgaaccgtgggagac

SEQ ID NO: 13956 - DNA, 20 bp, synthetic construct
  misc_feature 1..20: note = Description of Artificial Sequence: Synthetic oligonucleotide
  misc_feature 1..20: note = Target: ANGPTL4; (-) strand; PAM type: YTN; PAM sequence: CTT
  source 1..20: mol_type = other DNA
cctctacgaaccgtgggaga

SEQ ID NO: 13957 - DNA, 20 bp, synthetic construct
  misc_feature 1..20: note = Description of Artificial Sequence: Synthetic oligonucleotide
  misc_feature 1..20: note = Target: ANGPTL4; (-) strand; PAM type: YTN; PAM sequence: CTC
  source 1..20: mol_type = other DNA
aggcaggccttcctctacga

SEQ ID NO: 13958 - DNA, 20 bp, synthetic construct
  misc_feature 1..20: note = Description of Artificial Sequence: Synthetic oligonucleotide
  misc_feature 1..20: note = Target: ANGPTL4; (-) strand; PAM type: YTN; PAM sequence: CTC
  source 1..20: mol_type = other DNA
caggctcaggcaggccttcc

SEQ ID NO: 13959 - DNA, 20 bp, synthetic construct
  misc_feature 1..20: note = Description of Artificial Sequence: Synthetic oligonucleotide
  misc_feature 1..20: note = Target: ANGPTL4; (-) strand; PAM type: YTN; PAM sequence: CTC
  source 1..20: mol_type = other DNA
ccgcccccgctccaggctca

SEQ ID NO: 13960 - DNA, 20 bp, synthetic construct
  misc_feature 1..20: note = Description of Artificial Sequence: Synthetic oligonucleotide
  misc_feature 1..20: note = Target: ANGPTL4; (-) strand; PAM type: YTN; PAM sequence: CTC
  source 1..20: mol_type = other DNA
tcccgcccccgctccaggct

SEQ ID NO: 13961 - DNA, 20 bp, synthetic construct
  misc_feature 1..20: note = Description of Artificial Sequence: Synthetic oligonucleotide
  misc_feature 1..20: note = Target: ANGPTL4; (-) strand; PAM type: YTN; PAM sequence: CTG
  source 1..20: mol_type = other DNA
tggctctcccgcccccgctc

SEQ ID NO: 13962 - DNA, 20 bp, synthetic construct
  misc_feature 1..20: note = Description of Artificial Sequence: Synthetic oligonucleotide
  misc_feature 1..20: note = Target: ANGPTL4; (-) strand; PAM type: YTN; PAM sequence: CTG
  source 1..20: mol_type = other DNA
gggatgccaaactgtggctc

SEQ ID NO: 13963 - DNA, 20 bp, synthetic construct
  misc_feature 1..20: note = Description of Artificial Sequence: Synthetic oligonucleotide
  misc_feature 1..20: note = Target: ANGPTL4; (-) strand; PAM type: YTN; PAM sequence: CTG
  source 1..20: mol_type = other DNA
ggggatgccctggggatgcc

SEQ ID NO: 13964 - DNA, 20 bp, synthetic construct
  misc_feature 1..20: note = Description of Artificial Sequence: Synthetic oligonucleotide
  misc_feature 1..20: note = Target: ANGPTL4; (-) strand; PAM type: YTN; PAM sequence: CTG
  source 1..20: mol_type = other DNA
cgggctgggggatgccctgg

SEQ ID NO: 13965 - DNA, 20 bp, synthetic construct
  misc_feature 1..20: note = Description of Artificial Sequence: Synthetic oligonucleotide
  misc_feature 1..20: note = Target: ANGPTL4; (-) strand; PAM type: YTN; PAM sequence: CTG
  source 1..20: mol_type = other DNA
gtagtctgcgggctggggga

SEQ ID NO: 13966 - DNA, 20 bp, synthetic construct
  misc_feature 1..20: note = Description of Artificial Sequence: Synthetic oligonucleotide
  misc_feature 1..20: note = Target: ANGPTL4; (-) strand; PAM type: YTN; PAM sequence: CTG
  source 1..20: mol_type = other DNA
gaggcctggtagtctgcggg

SEQ ID NO: 13967 - DNA, 20 bp, synthetic construct
  misc_feature 1..20: note = Description of Artificial Sequence: Synthetic oligonucleotide
  misc_feature 1..20: note = Target: ANGPTL4; (-) strand; PAM type: YTN; PAM sequence: CTC
  source 1..20: mol_type = other DNA
tggaggcctggtagtctgcg

SEQ ID NO: 13968 - DNA, 20 bp, synthetic construct
  misc_feature 1..20: note = Description of Artificial Sequence: Synthetic oligonucleotide
  misc_feature 1..20: note = Target: ANGPTL4; (-) strand; PAM type: YTN; PAM sequence: CTG
  source 1..20: mol_type = other DNA
tcctctggaggcctggtagt

SEQ ID NO: 13969 - DNA, 20 bp, synthetic construct
  misc_feature 1..20: note = Description of Artificial Sequence: Synthetic oligonucleotide
  misc_feature 1..20: note = Target: ANGPTL4; (-) strand; PAM type: YTN; PAM sequence: CTG
  source 1..20: mol_type = other DNA
tggccgggggtggggtcctg

SEQ ID NO: 13970 - DNA, 20 bp, synthetic construct
  misc_feature 1..20: note = Description of Artificial Sequence: Synthetic oligonucleotide
  misc_feature 1..20: note = Target: ANGPTL4; (-) strand; PAM type: YTN; PAM sequence: CTG
  source 1..20: mol_type = other DNA
ggggcagggcctgtggccgg

SEQ ID NO: 13971 - DNA, 20 bp, synthetic construct
  misc_feature 1..20: note = Description of Artificial Sequence: Synthetic oligonucleotide
  misc_feature 1..20: note = Target: ANGPTL4; (-) strand; PAM type: YTN; PAM sequence: TTG
  source 1..20: mol_type = other DNA
gaggcggggtgcggggagtg

SEQ ID NO: 13972 - DNA, 20 bp, synthetic construct
  misc_feature 1..20: note = Description of Artificial Sequence: Synthetic oligonucleotide
  misc_feature 1..20: note = Target: ANGPTL4; (-) strand; PAM type: YTN; PAM sequence: CTT
  source 1..20: mol_type = other DNA
ggaggcggggtgcggggagt

SEQ ID NO: 13973 - DNA, 20 bp, synthetic construct
  misc_feature 1..20: note = Description of Artificial Sequence: Synthetic oligonucleotide
  misc_feature 1..20: note = Target: ANGPTL4; (-) strand; PAM type: YTN; PAM sequence: TTG
  source 1..20: mol_type = other DNA
ggtgcggagtgggcggagga

SEQ ID NO: 13974 - DNA, 20 bp, synthetic construct
  misc_feature 1..20: note = Description of Artificial Sequence: Synthetic oligonucleotide
  misc_feature 1..20: note = Target: ANGPTL4; (-) strand; PAM type: YTN; PAM sequence: TTA
  source 1..20: mol_type = other DNA
taagttgggtgcggagtggg

SEQ ID NO: 13975 - DNA, 20 bp, synthetic construct
  misc_feature 1..20: note = Description of Artificial Sequence: Synthetic oligonucleotide
  misc_feature 1..20: note = Target: ANGPTL4; (-) strand; PAM type: YTN; PAM sequence: TTT
  source 1..20: mol_type = other DNA
ataagttgggtgcggagtgg

SEQ ID NO: 13976 - DNA, 20 bp, synthetic construct
  misc_feature 1..20: note = Description of Artificial Sequence: Synthetic oligonucleotide
  misc_feature 1..20: note = Target: ANGPTL4; (-) strand; PAM type: YTN; PAM sequence: TTT
  source 1..20: mol_type = other DNA
tataagttgggtgcggagtg

SEQ ID NO: 13977 - DNA, 20 bp, synthetic construct
  misc_feature 1..20: note = Description of Artificial Sequence: Synthetic oligonucleotide
  misc_feature 1..20: note = Target: ANGPTL4; (-) strand; PAM type: YTN; PAM sequence: TTT
  source 1..20: mol_type = other DNA
ttataagttgggtgcggagt

SEQ ID NO: 13978 - DNA, 20 bp, synthetic construct
  misc_feature 1..20: note = Description of Artificial Sequence: Synthetic oligonucleotide
  misc_feature 1..20: note = Target: ANGPTL4; (-) strand; PAM type: YTN; PAM sequence: CTC
  source 1..20: mol_type = other DNA
cccgccgcgcccgaggacgg

SEQ ID NO: 13979 - DNA, 20 bp, synthetic construct
  misc_feature 1..20: note = Description of Artificial Sequence: Synthetic oligonucleotide
  misc_feature 1..20: note = Target: ANGPTL4; (-) strand; PAM type: YTN; PAM sequence: TTC
  source 1..20: mol_type = other DNA
tccccgccgcgcccgaggac

SEQ ID NO: 13980 - DNA, 20 bp, synthetic construct
  misc_feature 1..20: note = Description of Artificial Sequence: Synthetic oligonucleotide
  misc_feature 1..20: note = Target: ANGPTL4; (-) strand; PAM type: YTN; PAM sequence: CTT
  source 1..20: mol_type = other DNA
ctccccgccgcgcccgagga

SEQ ID NO: 13981 - DNA, 20 bp, synthetic construct
  misc_feature 1..20: note = Description of Artificial Sequence: Synthetic oligonucleotide
  misc_feature 1..20: note = Target: ANGPTL4; (-) strand; PAM type: YTN; PAM sequence: CTC
  source 1..20: mol_type = other DNA
ggcttctccccgccgcgccc

SEQ ID NO: 13982 - DNA, 20 bp, synthetic construct
  misc_feature 1..20: note = Description of Artificial Sequence: Synthetic oligonucleotide
  misc_feature 1..20: note = Target: ANGPTL4; (-) strand; PAM type: YTN; PAM sequence: CTC
  source 1..20: mol_type = other DNA
agctcggcttctccccgccg

SEQ ID NO: 13983 - DNA, 20 bp, synthetic construct
  misc_feature 1..20: note = Description of Artificial Sequence: Synthetic oligonucleotide
  misc_feature 1..20: note = Target: ANGPTL4; (-) strand; PAM type: YTN; PAM sequence: CTG
  source 1..20: mol_type = other DNA
gaaagaatcggatcacagtc

SEQ ID NO: 13984 - DNA, 20 bp, synthetic construct
  misc_feature 1..20: note = Description of Artificial Sequence: Synthetic oligonucleotide
  misc_feature 1..20: note = Target: ANGPTL4; (-) strand; PAM type: YTN; PAM sequence: TTG
  source 1..20: mol_type = other DNA
cagaagccgctggaaagaat

SEQ ID NO: 13985 - DNA, 20 bp, synthetic construct
  misc_feature 1..20: note = Description of Artificial Sequence: Synthetic oligonucleotide
  misc_feature 1..20: note = Target: ANGPTL4; (-) strand; PAM type: YTN; PAM sequence: TTG
  source 1..20: mol_type = other DNA
gttgcagaagccgctggaaa

SEQ ID NO: 13986 - DNA, 20 bp, synthetic construct
  misc_feature 1..20: note = Description of Artificial Sequence: Synthetic oligonucleotide
  misc_feature 1..20: note = Target: ANGPTL4; (-) strand; PAM type: YTN; PAM sequence: CTT
  source 1..20: mol_type = other DNA
ggttgcagaagccgctggaa

SEQ ID NO: 13987 - DNA, 20 bp, synthetic construct
  misc_feature 1..20: note = Description of Artificial Sequence: Synthetic oligonucleotide
  misc_feature 1..20: note = Target: ANGPTL4; (-) strand; PAM type: YTN; PAM sequence: CTG
  source 1..20: mol_type = other DNA
gagacgcggaggaccggggg

SEQ ID NO: 13988 - DNA, 20 bp, synthetic construct
  misc_feature 1..20: note = Description of Artificial Sequence: Synthetic oligonucleotide
  misc_feature 1..20: note = Target: ANGPTL4; (-) strand; PAM type: YTN; PAM sequence: TTC
  source 1..20: mol_type = other DNA
caggtgcgaggactggagac

SEQ ID NO: 13989 - DNA, 20 bp, synthetic construct
  misc_feature 1..20: note = Description of Artificial Sequence: Synthetic oligonucleotide
  misc_feature 1..20: note = Target: ANGPTL4; (-) strand; PAM type: YTN; PAM sequence: TTG
  source 1..20: mol_type = other DNA
gggttccaggtgcgaggact

SEQ ID NO: 13990 - DNA, 20 bp, synthetic construct
  misc_feature 1..20: note = Description of Artificial Sequence: Synthetic oligonucleotide
  misc_feature 1..20: note = Target: ANGPTL4; (-) strand; PAM type: YTN; PAM sequence: CTC
  source 1..20: mol_type = other DNA
ggggacgttggggttccagg

SEQ ID NO: 13991 - DNA, 20 bp, synthetic construct
  misc_feature 1..20: note = Description of Artificial Sequence: Synthetic oligonucleotide
  misc_feature 1..20: note = Target: ANGPTL4; (-) strand; PAM type: YTN; PAM sequence: CTC
  source 1..20: mol_type = other DNA
tcggggacgttggggttcca

SEQ ID NO: 13992 - DNA, 20 bp, synthetic construct
  misc_feature 1..20: note = Description of Artificial Sequence: Synthetic oligonucleotide
  misc_feature 1..20: note = Target: ANGPTL4; (-) strand; PAM type: YTN; PAM sequence: TTC
  source 1..20: mol_type = other DNA
ggggactctcggggacgttg

SEQ ID NO: 13993 - DNA, 20 bp, synthetic construct
  misc_feature 1..20: note = Description of Artificial Sequence: Synthetic oligonucleotide
  misc_feature 1..20: note = Target: ANGPTL4; (-) strand; PAM type: YTN; PAM sequence: CTG
  source 1..20: mol_type = other DNA
ggagcggggattcggggact

SEQ ID NO: 13994 - DNA, 20 bp, synthetic construct
  misc_feature 1..20: note = Description of Artificial Sequence: Synthetic oligonucleotide
  misc_feature 1..20: note = Target: ANGPTL4; (-) strand; PAM type: YTN; PAM sequence: TTA
  source 1..20: mol_type = other DNA
ggtagcctgggagcggggat

SEQ ID NO: 13995 - DNA, 20 bp, synthetic construct
  misc_feature 1..20: note = Description of Artificial Sequence: Synthetic oligonucleotide
  misc_feature 1..20: note = Target: ANGPTL4; (-) strand; PAM type: YTN; PAM sequence: CTT
  source 1..20: mol_type = other DNA
aggtagcctgggagcgggga

SEQ ID NO: 13996 - DNA, 20 bp, synthetic construct
  misc_feature 1..20: note = Description of Artificial Sequence: Synthetic oligonucleotide
  misc_feature 1..20: note = Target: ANGPTL4; (-) strand; PAM type: YTN; PAM sequence: CTC
  source 1..20: mol_type = other DNA
ttaggtagcctgggagcggg

SEQ ID NO: 13997 - DNA, 20 bp, synthetic construct
  misc_feature 1..20: note = Description of Artificial Sequence: Synthetic oligonucleotide
  misc_feature 1..20: note = Target: ANGPTL4; (-) strand; PAM type: YTN; PAM sequence: CTC
  source 1..20: mol_type = other DNA
atcctcttaggtagcctggg

SEQ ID NO: 13998 - DNA, 20 bp, synthetic construct
  misc_feature 1..20: note = Description of Artificial Sequence: Synthetic oligonucleotide
  misc_feature 1..20: note = Target: ANGPTL4; (-) strand; PAM type: YTN; PAM sequence: CTG
  source 1..20: mol_type = other DNA
ccccggccgtcggagcaccg

SEQ ID NO: 13999 - DNA, 20 bp, synthetic construct
  misc_feature 1..20: note = Description of Artificial Sequence: Synthetic oligonucleotide
  misc_feature 1..20: note = Target: ANGPTL4; (-) strand; PAM type: YTN; PAM sequence: CTC
  source 1..20: mol_type = other DNA
agtagcacggcggtggcggc

SEQ ID NO: 14000 - DNA, 20 bp, synthetic construct
  misc_feature 1..20: note = Description of Artificial Sequence: Synthetic oligonucleotide
  misc_feature 1..20: note = Target: ANGPTL4; (-) strand; PAM type: YTN; PAM sequence: CTG
  source 1..20: mol_type = other DNA
agcgctcagtagcacggcgg

SEQ ID NO: 14001 - DNA, 20 bp, synthetic construct
  misc_feature 1..20: note = Description of Artificial Sequence: Synthetic oligonucleotide
  misc_feature 1..20: note = Target: ANGPTL4; (-) strand; PAM type: YTN; PAM sequence: CTG
  source 1..20: mol_type = other DNA
cacgggtccgccctgagcgc

SEQ ID NO: 14002 - DNA, 20 bp, synthetic construct
  misc_feature 1..20: note = Description of Artificial Sequence: Synthetic oligonucleotide
  misc_feature 1..20: note = Target: ANGPTL4; (-) strand; PAM type: YTN; PAM sequence: TTG
  source 1..20: mol_type = other DNA
gactgcacgggtccgccctg

SEQ ID NO: 14003 - DNA, 20 bp, synthetic construct
  misc_feature 1..20: note = Description of Artificial Sequence: Synthetic oligonucleotide
  misc_feature 1..20: note = Target: ANGPTL4; (-) strand; PAM type: YTN; PAM sequence: CTT
  source 1..20: mol_type = other DNA
ggactgcacgggtccgccct

SEQ ID NO: 14004 - DNA, 20 bp, synthetic construct
  misc_feature 1..20: note = Description of Artificial Sequence: Synthetic oligonucleotide
  misc_feature 1..20: note = Target: ANGPTL4; (-) strand; PAM type: YTN; PAM sequence: CTC
  source 1..20: mol_type = other DNA
gtcccaggacgcaaagcgcg

SEQ ID NO: 14005 - DNA, 20 bp, synthetic construct
  misc_feature 1..20: note = Description of Artificial Sequence: Synthetic oligonucleotide
  misc_feature 1..20: note = Target: ANGPTL4; (-) strand; PAM type: YTN; PAM sequence: TTC
  source 1..20: mol_type = other DNA
atctcgtcccaggacgcaaa

SEQ ID NO: 14006 - DNA, 20 bp, synthetic construct
  misc_feature 1..20: note = Description of Artificial Sequence: Synthetic oligonucleotide
  misc_feature 1..20: note = Target: ANGPTL4; (-) strand; PAM type: YTN; PAM sequence: CTG
  source 1..20: mol_type = other DNA
caggagtccgtgcgccagga

SEQ ID NO: 14007 - DNA, 20 bp, synthetic construct
  misc_feature 1..20: note = Description of Artificial Sequence: Synthetic oligonucleotide
  misc_feature 1..20: note = Target: ANGPTL4; (-) strand; PAM type: YTN; PAM sequence: CTG
  source 1..20: mol_type = other DNA
gccgagctgcaggagtccgt

SEQ ID NO: 14008 - DNA, 20 bp, synthetic construct
  misc_feature 1..20: note = Description of Artificial Sequence: Synthetic oligonucleotide
  misc_feature 1..20: note = Target: ANGPTL4; (-) strand; PAM type: YTN; PAM sequence: TTC
  source 1..20: mol_type = other DNA
gcgcagcccctggccgagct

SEQ ID NO: 14009 - DNA, 20 bp, synthetic construct
  misc_feature 1..20: note = Description of Artificial Sequence: Synthetic oligonucleotide
  misc_feature 1..20: note = Target: ANGPTL4; (-) strand; PAM type: YTN; PAM sequence: CTC
  source 1..20: mol_type = other DNA
cgcgtgttcgcgcagcccct

SEQ ID NO: 14010 - DNA, 20 bp, synthetic construct
  misc_feature 1..20: note = Description of Artificial Sequence: Synthetic oligonucleotide
  misc_feature 1..20: note = Target: ANGPTL4; (-) strand; PAM type: YTN; PAM sequence: CTG
  source 1..20: mol_type = other DNA
cgggtgcgctccgcgtgttc

SEQ ID NO: 14011 - DNA, 20 bp, synthetic construct
  misc_feature 1..20: note = Description of Artificial Sequence: Synthetic oligonucleotide
  misc_feature 1..20: note = Target: ANGPTL4; (-) strand; PAM type: YTN; PAM sequence: CTG
  source 1..20: mol_type = other DNA
actgcgggtgcgctccgcgt

SEQ ID NO: 14012 - DNA, 20 bp, synthetic construct
  misc_feature 1..20: note = Description of Artificial Sequence: Synthetic oligonucleotide
  misc_feature 1..20: note = Target: ANGPTL4; (-) strand; PAM type: YTN; PAM sequence: CTC
  source 1..20: mol_type = other DNA
agctgactgcgggtgcgctc

SEQ ID NO: 14013 - DNA, 20 bp, synthetic construct
  misc_feature 1..20: note = Description of Artificial Sequence: Synthetic oligonucleotide
  misc_feature 1..20: note = Target: ANGPTL4; (-) strand; PAM type: YTN; PAM sequence: CTC
  source 1..20: mol_type = other DNA
cagcgcgctcagctgactgc

SEQ ID NO: 14014 - DNA, 20 bp, synthetic construct
  misc_feature 1..20: note = Description of Artificial Sequence: Synthetic oligonucleotide
  misc_feature 1..20: note = Target: ANGPTL4; (-) strand; PAM type: YTN; PAM sequence: CTC
  source 1..20: mol_type = other DNA
aggcgccgctccagcgcgct

SEQ ID NO: 14015 - DNA, 20 bp, synthetic construct
  misc_feature 1..20: note = Description of Artificial Sequence: Synthetic oligonucleotide
  misc_feature 1..20: note = Target: ANGPTL4; (-) strand; PAM type: YTN; PAM sequence: CTG
  source 1..20: mol_type = other DNA
acaggcggacccgcacgcgc

SEQ ID NO: 14016 - DNA, 20 bp, synthetic construct
  misc_feature 1..20: note = Description of Artificial Sequence: Synthetic oligonucleotide
  misc_feature 1..20: note = Target: ANGPTL4; (-) strand; PAM type: YTN; PAM sequence: TTC
  source 1..20: mol_type = other DNA
cctgacaggcggacccgcac

SEQ ID NO: 14017 - DNA, 20 bp, synthetic construct
  misc_feature 1..20: note = Description of Artificial Sequence: Synthetic oligonucleotide
  misc_feature 1..20: note = Target: ANGPTL4; (-) strand; PAM type: YTN; PAM sequence: CTC
  source 1..20: mol_type = other DNA
ggttccctgacaggcggacc

SEQ ID NO: 14018 - DNA, 20 bp, synthetic construct
  misc_feature 1..20: note = Description of Artificial Sequence: Synthetic oligonucleotide
  misc_feature 1..20: note = Target: ANGPTL4; (-) strand; PAM type: YTN; PAM sequence: CTA
  source 1..20: mol_type = other DNA
acgggaggtcggtggacccc

SEQ ID NO: 14019 - DNA, 20 bp, synthetic construct
  misc_feature 1..20: note = Description of Artificial Sequence: Synthetic oligonucleotide
  misc_feature 1..20: note = Target: ANGPTL4; (-) strand; PAM type: YTN; PAM sequence: CTC
  source 1..20: mol_type = other DNA
aggggctaacgggaggtcgg

SEQ ID NO: 14020 - DNA, 20 bp, synthetic construct
  misc_feature 1..20: note = Description of Artificial Sequence: Synthetic oligonucleotide
  misc_feature 1..20: note = Target: ANGPTL4; (-) strand; PAM type: YTN; PAM sequence: CTC
  source 1..20: mol_type = other DNA
tcaggggctaacgggaggtc

SEQ ID NO: 14021 - DNA, 20 bp, synthetic construct
  misc_feature 1..20: note = Description of Artificial Sequence: Synthetic oligonucleotide
  misc_feature 1..20: note = Target: ANGPTL4; (-) strand; PAM type: YTN; PAM sequence: CTC
  source 1..20: mol_type = other DNA
agggtccacccggctctcag

SEQ ID NO: 14022 - DNA, 20 bp, synthetic construct
  misc_feature 1..20: note = Description of Artificial Sequence: Synthetic oligonucleotide
  misc_feature 1..20: note = Target: ANGPTL4; (-) strand; PAM type: YTN; PAM sequence: CTG
  source 1..20: mol_type = other DNA
tgaaggacctcagggtccac

SEQ ID NO: 14023 - DNA, 20 bp, synthetic construct
  misc_feature 1..20: note = Description of Artificial Sequence: Synthetic oligonucleotide
  misc_feature 1..20: note = Target: ANGPTL4; (-) strand; PAM type: YTN; PAM sequence: CTG
  source 1..20: mol_type = other DNA
caggctgtgaaggacctcag

SEQ ID NO: 14024 - DNA, 20 bp, synthetic construct
  misc_feature 1..20: note = Description of Artificial Sequence: Synthetic oligonucleotide
  misc_feature 1..20: note = Target: ANGPTL4; (-) strand; PAM type: YTN; PAM sequence: CTG
  source 1..20: mol_type = other DNA
gggacacgtacctgcaggct

SEQ ID NO: 14025 - DNA, 20 bp, synthetic construct
  misc_feature 1..20: note = Description of Artificial Sequence: Synthetic oligonucleotide
  misc_feature 1..20: note = Target: ANGPTL4; (-) strand; PAM type: YTN; PAM sequence: CTA
  source 1..20: mol_type = other DNA
ggggcgcggagaaccagccc

SEQ ID NO: 14026 - DNA, 20 bp, synthetic construct
  misc_feature 1..20: note = Description of Artificial Sequence: Synthetic oligonucleotide
  misc_feature 1..20: note = Target: ANGPTL4; (-) strand; PAM type: YTN; PAM sequence: TTC
  source 1..20: mol_type = other DNA
caagccaggagagccactag

SEQ ID NO: 14027 - DNA, 20 bp, synthetic construct
  misc_feature 1..20: note = Description of Artificial Sequence: Synthetic oligonucleotide
  misc_feature 1..20: note = Target: ANGPTL4; (-) strand; PAM type: YTN; PAM sequence: CTT
  source 1..20: mol_type = other DNA
ccaagccaggagagccacta

SEQ ID NO: 14028 - DNA, 20 bp, synthetic construct
  misc_feature 1..20: note = Description of Artificial Sequence: Synthetic oligonucleotide
  misc_feature 1..20: note = Target: ANGPTL4; (-) strand; PAM type: YTN; PAM sequence: CTG
  source 1..20: mol_type = other DNA
tccatacccttccaagccag

SEQ ID NO: 14029 - DNA, 20 bp, synthetic construct
  misc_feature 1..20: note = Description of Artificial Sequence: Synthetic oligonucleotide
  misc_feature 1..20: note = Target: ANGPTL4; (-) strand; PAM type: YTN; PAM sequence: CTC
  source 1..20: mol_type = other DNA
ctgtccatacccttccaagc

SEQ ID NO: 14030 - DNA, 20 bp, synthetic construct
  misc_feature 1..20: note = Description of Artificial Sequence: Synthetic oligonucleotide
  misc_feature 1..20: note = Target: ANGPTL4; (-) strand; PAM type: YTN; PAM sequence: TTG
  source 1..20: mol_type = other DNA
cgcaccccgcccccacgccc

SEQ ID NO: 14031 - DNA, 20 bp, synthetic construct
  misc_feature 1..20: note = Description of Artificial Sequence: Synthetic oligonucleotide
  misc_feature 1..20: note = Target: ANGPTL4; (-) strand; PAM type: YTN; PAM sequence: TTG
  source 1..20: mol_type = other DNA
acgcagggaagcccagggag

SEQ ID NO: 14032 - DNA, 20 bp, synthetic construct
  misc_feature 1..20: note = Description of Artificial Sequence: Synthetic oligonucleotide
  misc_feature 1..20: note = Target: ANGPTL4; (-) strand; PAM type: YTN; PAM sequence: CTT
  source 1..20: mol_type = other DNA
gacgcagggaagcccaggga

SEQ ID NO: 14033 - DNA, 20 bp, synthetic construct
  misc_feature 1..20: note = Description of Artificial Sequence: Synthetic oligonucleotide
  misc_feature 1..20: note = Target: ANGPTL4; (-) strand; PAM type: YTN; PAM sequence: CTA
  source 1..20: mol_type = other DNA
aggggggagcccatcccttg

SEQ ID NO: 14034 - DNA, 20 bp, synthetic construct
  misc_feature 1..20: note = Description of Artificial Sequence: Synthetic oligonucleotide
  misc_feature 1..20: note = Target: ANGPTL4; (-) strand; PAM type: YTN; PAM sequence: TTC
  source 1..20: mol_type = other DNA
ctaaggggggagcccatccc

SEQ ID NO: 14035 - DNA, 20 bp, synthetic construct
  misc_feature 1..20: note = Description of Artificial Sequence: Synthetic oligonucleotide
  misc_feature 1..20: note = Target: ANGPTL4; (-) strand; PAM type: YTN; PAM sequence: CTT
  source 1..20: mol_type = other DNA
cctaaggggggagcccatcc

SEQ ID NO: 14036 - DNA, 20 bp, synthetic construct
  misc_feature 1..20: note = Description of Artificial Sequence: Synthetic oligonucleotide
  misc_feature 1..20: note = Target: ANGPTL4; (-) strand; PAM type: YTN; PAM sequence: CTC
  source 1..20: mol_type = other DNA
ggcttcctaaggggggagcc

SEQ ID NO: 14037 - DNA, 20 bp, synthetic construct
  misc_feature 1..20: note = Description of Artificial Sequence: Synthetic oligonucleotide
  misc_feature 1..20: note = Target: ANGPTL4; (-) strand; PAM type: YTN; PAM sequence: CTC
  source 1..20: mol_type = other DNA
ctcggcttcctaagggggga

SEQ ID NO: 14038 - DNA, 20 bp, synthetic construct
  misc_feature 1..20: note = Description of Artificial Sequence: Synthetic oligonucleotide
  misc_feature 1..20: note = Target: ANGPTL4; (-) strand; PAM type: YTN; PAM sequence: CTC
  source 1..20: mol_type = other DNA
cctcctcggcttcctaaggg

SEQ ID NO: 14039 - DNA, 20 bp, synthetic construct
  misc_feature 1..20: note = Description of Artificial Sequence: Synthetic oligonucleotide
  misc_feature 1..20: note = Target: ANGPTL4; (-) strand; PAM type: YTN; PAM sequence: TTG
  source 1..20: mol_type = other DNA
agcgaacctccctcctcggc

SEQ ID NO: 14040 - DNA, 20 bp, synthetic construct
  misc_feature 1..20: note = Description of Artificial Sequence: Synthetic oligonucleotide
  misc_feature 1..20: note = Target: ANGPTL4; (-) strand; PAM type: YTN; PAM sequence: CTT
  source 1..20: mol_type = other DNA
gagcgaacctccctcctcgg

SEQ ID NO: 14041 - DNA, 20 bp, synthetic construct
  misc_feature 1..20: note = Description of Artificial Sequence: Synthetic oligonucleotide
  misc_feature 1..20: note = Target: ANGPTL4; (-) strand; PAM type: YTN; PAM sequence: CTG
  source 1..20: mol_type = other DNA
gccttgagcgaacctccctc

SEQ ID NO: 14042 - DNA, 20 bp, synthetic construct
  misc_feature 1..20: note = Description of Artificial Sequence: Synthetic oligonucleotide
  misc_feature 1..20: note = Target: ANGPTL4; (-) strand; PAM type: YTN; PAM sequence: TTC
  source 1..20: mol_type = other DNA
ctggccttgagcgaacctcc

SEQ ID NO: 14043 - DNA, 20 bp, synthetic construct
  misc_feature 1..20: note = Description of Artificial Sequence: Synthetic oligonucleotide
  misc_feature 1..20: note = Target: ANGPTL4; (-) strand; PAM type: YTN; PAM sequence: TTG
  source 1..20: mol_type = other DNA
aattcctggccttgagcgaa

SEQ ID NO: 14044 - DNA, 20 bp, synthetic construct
  misc_feature 1..20: note = Description of Artificial Sequence: Synthetic oligonucleotide
  misc_feature 1..20: note = Target: ANGPTL4; (-) strand; PAM type: YTN; PAM sequence: CTT
  source 1..20: mol_type = other DNA
gaattcctggccttgagcga

SEQ ID NO: 14045 - DNA, 20 bp, synthetic construct
  misc_feature 1..20: note = Description of Artificial Sequence: Synthetic oligonucleotide
  misc_feature 1..20: note = Target: ANGPTL4; (-) strand; PAM type: YTN; PAM sequence: TTA
  source 1..20: mol_type = other DNA
ggtggtcttgaattcctggc

SEQ ID NO: 14046 - DNA, 20 bp, synthetic construct
  misc_feature 1..20: note = Description of Artificial Sequence: Synthetic oligonucleotide
  misc_feature 1..20: note = Target: ANGPTL4; (-) strand; PAM type: YTN; PAM sequence: TTT
  source 1..20: mol_type = other DNA
aggtggtcttgaattcctgg

SEQ ID NO: 14047 - DNA, 20 bp, synthetic construct
  misc_feature 1..20: note = Description of Artificial Sequence: Synthetic oligonucleotide
  misc_feature 1..20: note = Target: ANGPTL4; (-) strand; PAM type: YTN; PAM sequence: CTT
  source 1..20: mol_type = other DNA
taggtggtcttgaattcctg

SEQ ID NO: 14048 - DNA, 20 bp, synthetic construct
  misc_feature 1..20: note = Description of Artificial Sequence: Synthetic oligonucleotide
  misc_feature 1..20: note = Target: ANGPTL4; (-) strand; PAM type: YTN; PAM sequence: TTG
  source 1..20: mol_type = other DNA
ctttaggtggtcttgaattc

SEQ ID NO: 14049 - DNA, 20 bp, synthetic construct
  misc_feature 1..20: note = Description of Artificial Sequence: Synthetic oligonucleotide
  misc_feature 1..20: note = Target: ANGPTL4; (-) strand; PAM type: YTN; PAM sequence: TTT
  source 1..20: mol_type = other DNA
gctttaggtggtcttgaatt

SEQ ID NO: 14050 - DNA, 20 bp, synthetic construct
  misc_feature 1..20: note = Description of Artificial Sequence: Synthetic oligonucleotide
  misc_feature 1..20: note = Target: ANGPTL4; (-) strand; PAM type: YTN; PAM sequence: TTT
  source 1..20: mol_type = other DNA
tgctttaggtggtcttgaat

SEQ ID NO: 14051 - DNA, 20 bp, synthetic construct
  misc_feature 1..20: note = Description of Artificial Sequence: Synthetic oligonucleotide
  misc_feature 1..20: note = Target: ANGPTL4; (-) strand; PAM type: YTN; PAM sequence: CTA
  source 1..20: mol_type = other DNA
ttttgctttaggtggtcttg

SEQ ID NO: 14052 - DNA, 20 bp, synthetic construct
  misc_feature 1..20: note = Description of Artificial Sequence: Synthetic oligonucleotide
  misc_feature 1..20: note = Target: ANGPTL4; (-) strand; PAM type: YTN; PAM sequence: CTC
  source 1..20: mol_type = other DNA
gctattttgctttaggtggt

SEQ ID NO: 14053 - DNA, 20 bp, synthetic construct
  misc_feature 1..20: note = Description of Artificial Sequence: Synthetic oligonucleotide
  misc_feature 1..20: note = Target: ANGPTL4; (-) strand; PAM type: YTN; PAM sequence: TTG
  source 1..20: mol_type = other DNA
tgtgtgtgtgtgtgtgtgtg

SEQ ID NO: 14054 - DNA, 20 bp, synthetic construct
  misc_feature 1..20: note = Description of Artificial Sequence: Synthetic oligonucleotide
  misc_feature 1..20: note = Target: ANGPTL4; (-) strand; PAM type: YTN; PAM sequence: TTT
  source 1..20: mol_type = other DNA
gtgtgtgtgtgtgtgtgtgt

SEQ ID NO: 14055 - DNA, 20 bp, synthetic construct
  misc_feature 1..20: note = Description of Artificial Sequence: Synthetic oligonucleotide
  misc_feature 1..20: note = Target: ANGPTL4; (-) strand; PAM type: YTN; PAM sequence: TTT
  source 1..20: mol_type = other DNA
tgtgtgtgtgtgtgtgtgtg

SEQ ID NO: 14056 - DNA, 20 bp, synthetic construct
  misc_feature 1..20: note = Description of Artificial Sequence: Synthetic oligonucleotide
  misc_feature 1..20: note = Target: ANGPTL4; (-) strand; PAM type: YTN; PAM sequence: TTA
  source 1..20: mol_type = other DNA
ttttgtgtgtgtgtgtgtgt

SEQ ID NO: 14057 - DNA, 20 bp, synthetic construct
  misc_feature 1..20: note = Description of Artificial Sequence: Synthetic oligonucleotide
  misc_feature 1..20: note = Target: ANGPTL4; (-) strand; PAM type: YTN; PAM sequence: TTT
  source 1..20: mol_type = other DNA
attttgtgtgtgtgtgtgtg

SEQ ID NO: 14058 - DNA, 20 bp, synthetic construct
  misc_feature 1..20: note = Description of Artificial Sequence: Synthetic oligonucleotide
  misc_feature 1..20: note = Target: ANGPTL4; (-) strand; PAM type: YTN; PAM sequence: TTA
  source 1..20: mol_type = other DNA
tttattttgtgtgtgtgtgt

SEQ ID NO: 14059 - DNA, 20 bp, synthetic construct
  misc_feature 1..20: note = Description of Artificial Sequence: Synthetic oligonucleotide
  misc_feature 1..20: note = Target: ANGPTL4; (-) strand; PAM type: YTN; PAM sequence: TTT
  source 1..20: mol_type = other DNA
atttattttgtgtgtgtgtg

SEQ ID NO: 14060 - DNA, 20 bp, synthetic construct
  misc_feature 1..20: note = Description of Artificial Sequence: Synthetic oligonucleotide
  misc_feature 1..20: note = Target: ANGPTL4; (-) strand; PAM type: YTN; PAM sequence: TTT
  source 1..20: mol_type = other DNA
tatttattttgtgtgtgtgt

SEQ ID NO: 14061 - DNA, 20 bp, synthetic construct
  misc_feature 1..20: note = Description of Artificial Sequence: Synthetic oligonucleotide
  misc_feature 1..20: note = Target: ANGPTL4; (-) strand; PAM type: YTN; PAM sequence: TTA
  source 1..20: mol_type = other DNA
ttttatttattttgtgtgtg

SEQ ID NO: 14062 - DNA, 20 bp, synthetic construct
  misc_feature 1..20: note = Description of Artificial Sequence: Synthetic oligonucleotide
  misc_feature 1..20: note = Target: ANGPTL4; (-) strand; PAM type: YTN; PAM sequence: TTT
  source 1..20: mol_type = other DNA
attttatttattttgtgtgt

SEQ ID NO: 14063 - DNA, 20 bp, synthetic construct
  misc_feature 1..20: note = Description of Artificial Sequence: Synthetic oligonucleotide
  misc_feature 1..20: note = Target: ANGPTL4; (-) strand; PAM type: YTN; PAM sequence: TTT
  source 1..20: mol_type = other DNA
tattttatttattttgtgtg

SEQ ID NO: 14064 - DNA, 20 bp, synthetic construct
  misc_feature 1..20: note = Description of Artificial Sequence: Synthetic oligonucleotide
  misc_feature 1..20: note = Target: ANGPTL4; (-) strand; PAM type: YTN; PAM sequence: TTA
  source 1..20: mol_type = other DNA
ttttattttatttattttgt

SEQ ID NO: 14065 - DNA, 20 bp, synthetic construct
  misc_feature 1..20: note = Description of Artificial Sequence: Synthetic oligonucleotide
  misc_feature 1..20: note = Target: ANGPTL4; (-) strand; PAM type: YTN; PAM sequence: TTT
  source 1..20: mol_type = other DNA
attttattttatttattttg

SEQ ID NO: 14066 - DNA, 20 bp, synthetic construct
  misc_feature 1..20: note = Description of Artificial Sequence: Synthetic oligonucleotide
  misc_feature 1..20: note = Target: ANGPTL4; (-) strand; PAM type: YTN; PAM sequence: TTT
  source 1..20: mol_type = other DNA
tattttattttatttatttt

SEQ ID NO: 14067 - DNA, 20 bp, synthetic construct
  misc_feature 1..20: note = Description of Artificial Sequence: Synthetic oligonucleotide
  misc_feature 1..20: note = Target: ANGPTL4; (-) strand; PAM type: YTN; PAM sequence: TTA
  source 1..20: mol_type = other DNA
ttttattttattttatttat

SEQ ID NO: 14068 - DNA, 20 bp, synthetic construct
  misc_feature 1..20: note = Description of Artificial Sequence: Synthetic oligonucleotide
  misc_feature 1..20: note = Target: ANGPTL4; (-) strand; PAM type: YTN; PAM sequence: TTT
  source 1..20: mol_type = other DNA
attttattttattttattta

SEQ ID NO: 14069 - DNA, 20 bp, synthetic construct
  misc_feature 1..20: note = Description of Artificial Sequence: Synthetic oligonucleotide
  misc_feature 1..20: note = Target: ANGPTL4; (-) strand; PAM type: YTN; PAM sequence: TTA
  source 1..20: mol_type = other DNA
tatttattttattttatttt

SEQ ID NO: 14070 - DNA, 20 bp, synthetic construct
  misc_feature 1..20: note = Description of Artificial Sequence: Synthetic oligonucleotide
  misc_feature 1..20: note = Target: ANGPTL4; (-) strand; PAM type: YTN; PAM sequence: TTT
  source 1..20: mol_type = other DNA
atatttattttattttattt

SEQ ID NO: 14071 - DNA, 20 bp, synthetic construct
  misc_feature 1..20: note = Description of Artificial Sequence: Synthetic oligonucleotide
  misc_feature 1..20: note = Target: ANGPTL4; (-) strand; PAM type: YTN; PAM sequence: TTT
  source 1..20: mol_type = other DNA
tatatttattttattttatt

SEQ ID NO: 14072 - DNA, 20 bp, synthetic construct
  misc_feature 1..20: note = Description of Artificial Sequence: Synthetic oligonucleotide
  misc_feature 1..20: note = Target: ANGPTL4; (-) strand; PAM type: YTN; PAM sequence: TTA
  source 1..20: mol_type = other DNA
attttatatttattttattt

SEQ ID NO: 14073 - DNA, 20 bp, synthetic construct
  misc_feature 1..20: note = Description of Artificial Sequence: Synthetic oligonucleotide
  misc_feature 1..20: note = Target: ANGPTL4; (-) strand; PAM type: YTN; PAM sequence: TTT
  source 1..20: mol_type = other DNA
aattttatatttattttatt

SEQ ID NO: 14074 - DNA, 20 bp, synthetic construct
  misc_feature 1..20: note = Description of Artificial Sequence: Synthetic oligonucleotide
  misc_feature 1..20: note = Target: ANGPTL4; (-) strand; PAM type: YTN; PAM sequence: TTT
  source 1..20: mol_type = other DNA
taattttatatttattttat

SEQ ID NO: 14075 - DNA, 20 bp, synthetic construct
  misc_feature 1..20: note = Description of Artificial Sequence: Synthetic oligonucleotide
  misc_feature 1..20: note = Target: ANGPTL4; (-) strand; PAM type: YTN; PAM sequence: TTT
  source 1..20: mol_type = other DNA
ttaattttatatttatttta

SEQ ID NO: 14076 - DNA, 20 bp, synthetic construct
  misc_feature 1..20: note = Description of Artificial Sequence: Synthetic oligonucleotide
  misc_feature 1..20: note = Target: ANGPTL4; (-) strand; PAM type: YTN; PAM sequence: TTT
  source 1..20: mol_type = other DNA
tttaattttatatttatttt

SEQ ID NO: 14077 - DNA, 20 bp, synthetic construct
  misc_feature 1..20: note = Description of Artificial Sequence: Synthetic oligonucleotide
  misc_feature 1..20: note = Target: ANGPTL4; (-) strand; PAM type: YTN; PAM sequence: CTG
  source 1..20: mol_type = other DNA
cgcccggtcgttttttaatt

SEQ ID NO: 14078 - DNA, 20 bp, synthetic construct
  misc_feature 1..20: note = Description of Artificial Sequence: Synthetic oligonucleotide
  misc_feature 1..20: note = Target: ANGPTL4; (-) strand; PAM type: YTN; PAM sequence: CTC
  source 1..20: mol_type = other DNA
cgtgagccactgcgcccggt

SEQ ID NO: 14079 - DNA, 20 bp, synthetic construct
  misc_feature 1..20: note = Description of Artificial Sequence: Synthetic oligonucleotide
  misc_feature 1..20: note = Target: ANGPTL4; (-) strand; PAM type: YTN; PAM sequence: CTC
  source 1..20: mol_type = other DNA
gacagcaggtggaggctccg

SEQ ID NO: 14080 - DNA, 20 bp, synthetic construct
  misc_feature 1..20: note = Description of Artificial Sequence: Synthetic oligonucleotide
  misc_feature 1..20: note = Target: ANGPTL4; (-) strand; PAM type: YTN; PAM sequence: CTA
  source 1..20: mol_type = other DNA
gtctcgacagcaggtggagg

SEQ ID NO: 14081 - DNA, 20 bp, synthetic construct
  misc_feature 1..20: note = Description of Artificial Sequence: Synthetic oligonucleotide
  misc_feature 1..20: note = Target: ANGPTL4; (-) strand; PAM type: YTN; PAM sequence: TTG
  source 1..20: mol_type = other DNA
gccaggctagtctcgacagc

SEQ ID NO: 14082 - DNA, 20 bp, synthetic construct
  misc_feature 1..20: note = Description of Artificial Sequence: Synthetic oligonucleotide
  misc_feature 1..20: note = Target: ANGPTL4; (-) strand; PAM type: YTN; PAM sequence: CTC
  source 1..20: mol_type = other DNA
catgttggccaggctagtct

SEQ ID NO: 14083 - DNA, 20 bp, synthetic construct
  misc_feature 1..20: note = Description of Artificial Sequence: Synthetic oligonucleotide
  misc_feature 1..20: note = Target: ANGPTL4; (-) strand; PAM type: YTN; PAM sequence: TTC
  source 1..20: mol_type = other DNA
tccatgttggccaggctagt

SEQ ID NO: 14084 - DNA, 20 bp, synthetic construct
  misc_feature 1..20: note = Description of Artificial Sequence: Synthetic oligonucleotide
  misc_feature 1..20: note = Target: ANGPTL4; (-) strand; PAM type: YTN; PAM sequence: TTT
  source 1..20: mol_type = other DNA
ctccatgttggccaggctag

SEQ ID NO: 14085 - DNA, 20 bp, synthetic construct
  misc_feature 1..20: note = Description of Artificial Sequence: Synthetic oligonucleotide
  misc_feature 1..20: note = Target: ANGPTL4; (-) strand; PAM type: YTN; PAM sequence: TTA
  source 1..20: mol_type = other DNA
gtagagacgaggtttctcca

SEQ ID NO: 14086 - DNA, 20 bp, synthetic construct
  misc_feature 1..20: note = Description of Artificial Sequence: Synthetic oligonucleotide
  misc_feature 1..20: note = Target: ANGPTL4; (-) strand; PAM type: YTN; PAM sequence: TTT
  source 1..20: mol_type = other DNA
agtagagacgaggtttctcc

SEQ ID NO: 14087 - DNA, 20 bp, synthetic construct
  misc_feature 1..20: note = Description of Artificial Sequence: Synthetic oligonucleotide
  misc_feature 1..20: note = Target: ANGPTL4; (-) strand; PAM type: YTN; PAM sequence: TTT
  source 1..20: mol_type = other DNA
tagtagagacgaggtttctc

SEQ ID NO: 14088 - DNA, 20 bp, synthetic construct
  misc_feature 1..20: note = Description of Artificial Sequence: Synthetic oligonucleotide
  misc_feature 1..20: note = Target: ANGPTL4; (-) strand; PAM type: YTN; PAM sequence: TTT
  source 1..20: mol_type = other DNA
ttagtagagacgaggtttct

SEQ ID NO: 14089 - DNA, 20 bp, synthetic construct
  misc_feature 1..20: note = Description of Artificial Sequence: Synthetic oligonucleotide
  misc_feature 1..20: note = Target: ANGPTL4; (-) strand; PAM type: YTN; PAM sequence: TTG
  source 1..20: mol_type = other DNA
tatttttagtagagacgagg

SEQ ID NO: 14090 - DNA, 20 bp, synthetic construct
  misc_feature 1..20: note = Description of Artificial Sequence: Synthetic oligonucleotide
  misc_feature 1..20: note = Target: ANGPTL4; (-) strand; PAM type: YTN; PAM sequence: TTT
  source 1..20: mol_type = other DNA
gtatttttagtagagacgag

SEQ ID NO: 14091 - DNA, 20 bp, synthetic construct
  misc_feature 1..20: note = Description of Artificial Sequence: Synthetic oligonucleotide
  misc_feature 1..20: note = Target: ANGPTL4; (-) strand; PAM type: YTN; PAM sequence: TTT
  source 1..20: mol_type = other DNA
tgtatttttagtagagacga

SEQ ID NO: 14092 - DNA, 20 bp, synthetic construct
  misc_feature 1..20: note = Description of Artificial Sequence: Synthetic oligonucleotide
  misc_feature 1..20: note = Target: ANGPTL4; (-) strand; PAM type: YTN; PAM sequence: TTT
  source 1..20: mol_type = other DNA
ttgtatttttagtagagacg

SEQ ID NO: 14093 - DNA, 20 bp, synthetic construct
  misc_feature 1..20: note = Description of Artificial Sequence: Synthetic oligonucleotide
  misc_feature 1..20: note = Target: ANGPTL4; (-) strand; PAM type: YTN; PAM sequence: TTT
  source 1..20: mol_type = other DNA
tttgtatttttagtagagac

SEQ ID NO: 14094 - DNA, 20 bp, synthetic construct
  misc_feature 1..20: note = Description of Artificial Sequence: Synthetic oligonucleotide
  misc_feature 1..20: note = Target: ANGPTL4; (-) strand; PAM type: YTN; PAM sequence: CTA
  source 1..20: mol_type = other DNA
attttttgtatttttagtag

SEQ ID NO: 14095 - DNA, 20 bp, synthetic construct
  misc_feature 1..20: note = Description of Artificial Sequence: Synthetic oligonucleotide
  misc_feature 1..20: note = Target: ANGPTL4; (-) strand; PAM type: YTN; PAM sequence: TTA
  source 1..20: mol_type = other DNA
caggcatgcacaccatgcca

SEQ ID NO: 14096 - DNA, 20 bp, synthetic construct
  misc_feature 1..20: note = Description of Artificial Sequence: Synthetic oligonucleotide
  misc_feature 1..20: note = Target: ANGPTL4; (-) strand; PAM type: YTN; PAM sequence: CTG
  source 1..20: mol_type = other DNA
ggattacaggcatgcacacc

SEQ ID NO: 14097 - DNA, 20 bp, synthetic construct
  misc_feature 1..20: note = Description of Artificial Sequence: Synthetic oligonucleotide
  misc_feature 1..20: note = Target: ANGPTL4; (-) strand; PAM type: YTN; PAM sequence: CTC
  source 1..20: mol_type = other DNA
ccaagtagctgggattacag

SEQ ID NO: 14098 - DNA, 20 bp, synthetic construct
  misc_feature 1..20: note = Description of Artificial Sequence: Synthetic oligonucleotide
  misc_feature 1..20: note = Target: ANGPTL4; (-) strand; PAM type: YTN; PAM sequence: CTC
  source 1..20: mol_type = other DNA
agcctcccaagtagctggga

SEQ ID NO: 14099 - DNA, 20 bp, synthetic construct
  misc_feature 1..20: note = Description of Artificial Sequence: Synthetic oligonucleotide
  misc_feature 1..20: note = Target: ANGPTL4; (-) strand; PAM type: YTN; PAM sequence: CTG
  source 1..20: mol_type = other DNA
cctcagcctcccaagtagct

SEQ ID NO: 14100 - DNA, 20 bp, synthetic construct
  misc_feature 1..20: note = Description of Artificial Sequence: Synthetic oligonucleotide
  misc_feature 1..20: note = Target: ANGPTL4; (-) strand; PAM type: YTN; PAM sequence: CTC
  source 1..20: mol_type = other DNA
ctgcctcagcctcccaagta

SEQ ID NO: 14101 - DNA, 20 bp, synthetic construct
  misc_feature 1..20: note = Description of Artificial Sequence: Synthetic oligonucleotide
  misc_feature 1..20: note = Target: ANGPTL4; (-) strand; PAM type: YTN; PAM sequence: TTC
  source 1..20: mol_type = other DNA
tcctgcctcagcctcccaag

SEQ ID NO: 14102 - DNA, 20 bp, synthetic construct
  misc_feature 1..20: note = Description of Artificial Sequence: Synthetic oligonucleotide
  misc_feature 1..20: note = Target: ANGPTL4; (-) strand; PAM type: YTN; PAM sequence: TTC
  source 1..20: mol_type = other DNA
aagagattctcctgcctcag

SEQ ID NO: 14103 - DNA, 20 bp, synthetic construct
  misc_feature 1..20: note = Description of Artificial Sequence: Synthetic oligonucleotide
  misc_feature 1..20: note = Target: ANGPTL4; (-) strand; PAM type: YTN; PAM sequence: CTC
  source 1..20: mol_type = other DNA
ccgggttcaagagattctcc

SEQ ID NO: 14104 - DNA, 20 bp, synthetic construct
  misc_feature 1..20: note = Description of Artificial Sequence: Synthetic oligonucleotide
  misc_feature 1..20: note = Target: ANGPTL4; (-) strand; PAM type: YTN; PAM sequence: CTG
  source 1..20: mol_type = other DNA
cctcccgggttcaagagatt

SEQ ID NO: 14105 - DNA, 20 bp, synthetic construct
  misc_feature 1..20: note = Description of Artificial Sequence: Synthetic oligonucleotide
  misc_feature 1..20: note = Target: ANGPTL4; (-) strand; PAM type: YTN; PAM sequence: CTC
  source 1..20: mol_type = other DNA
tgcctcccgggttcaagaga

SEQ ID NO: 14106 - DNA, 20 bp, synthetic construct
  misc_feature 1..20: note = Description of Artificial Sequence: Synthetic oligonucleotide
  misc_feature 1..20: note = Target: ANGPTL4; (-) strand; PAM type: YTN; PAM sequence: CTG
  source 1..20: mol_type = other DNA
caacctctgcctcccgggtt

SEQ ID NO: 14107 - DNA, 20 bp, synthetic construct
  misc_feature 1..20: note = Description of Artificial Sequence: Synthetic oligonucleotide
  misc_feature 1..20: note = Target: ANGPTL4; (-) strand; PAM type: YTN; PAM sequence: CTC
  source 1..20: mol_type = other DNA
actgcaacctctgcctcccg

SEQ ID NO: 14108 - DNA, 20 bp, synthetic construct
  misc_feature 1..20: note = Description of Artificial Sequence: Synthetic oligonucleotide
  misc_feature 1..20: note = Target: ANGPTL4; (-) strand; PAM type: YTN; PAM sequence: CTC
  source 1..20: mol_type = other DNA
ggctcactgcaacctctgcc

SEQ ID NO: 14109 - DNA, 20 bp, synthetic construct
  misc_feature 1..20: note = Description of Artificial Sequence: Synthetic oligonucleotide
  misc_feature 1..20: note = Target: ANGPTL4; (-) strand; PAM type: YTN; PAM sequence: CTG
  source 1..20: mol_type = other DNA
cgatctcggctcactgcaac

SEQ ID NO: 14110 - DNA, 20 bp, synthetic construct
  misc_feature 1..20: note = Description of Artificial Sequence: Synthetic oligonucleotide
  misc_feature 1..20: note = Target: ANGPTL4; (-) strand; PAM type: YTN; PAM sequence: CTG
  source 1..20: mol_type = other DNA
gagtgcagtgctgcgatctc

SEQ ID NO: 14111 - DNA, 20 bp, synthetic construct
  misc_feature 1..20: note = Description of Artificial Sequence: Synthetic oligonucleotide
  misc_feature 1..20: note = Target: ANGPTL4; (-) strand; PAM type: YTN; PAM sequence: TTG
  source 1..20: mol_type = other DNA
cccaggctggagtgcagtgc

SEQ ID NO: 14112 - DNA, 20 bp, synthetic construct
  misc_feature 1..20: note = Description of Artificial Sequence: Synthetic oligonucleotide
  misc_feature 1..20: note = Target: ANGPTL4; (-) strand; PAM type: YTN; PAM sequence: CTG
  source 1..20: mol_type = other DNA
ttgcccaggctggagtgcag

SEQ ID NO: 14113 - DNA, 20 bp, synthetic construct
  misc_feature 1..20: note = Description of Artificial Sequence: Synthetic oligonucleotide
  misc_feature 1..20: note = Target: ANGPTL4; (-) strand; PAM type: YTN; PAM sequence: CTC
  source 1..20: mol_type = other DNA
tgttgcccaggctggagtgc

SEQ ID NO: 14114 - DNA, 20 bp, synthetic construct
  misc_feature 1..20: note = Description of Artificial Sequence: Synthetic oligonucleotide
  misc_feature 1..20: note = Target: ANGPTL4; (-) strand; PAM type: YTN; PAM sequence: CTC
  source 1..20: mol_type = other DNA
actctgttgcccaggctgga

SEQ ID NO: 14115 - DNA, 20 bp, synthetic construct
  misc_feature 1..20: note = Description of Artificial Sequence: Synthetic oligonucleotide
  misc_feature 1..20: note = Target: ANGPTL4; (-) strand; PAM type: YTN; PAM sequence: TTG
  source 1..20: mol_type = other DNA
aggagtctcactctgttgcc

SEQ ID NO: 14116 - DNA, 20 bp, synthetic construct
  misc_feature 1..20: note = Description of Artificial Sequence: Synthetic oligonucleotide
  misc_feature 1..20: note = Target: ANGPTL4; (-) strand; PAM type: YTN; PAM sequence: TTT
  source 1..20: mol_type = other DNA
gaggagtctcactctgttgc

SEQ ID NO: 14117 - DNA, 20 bp, synthetic construct
  misc_feature 1..20: note = Description of Artificial Sequence: Synthetic oligonucleotide
  misc_feature 1..20: note = Target: ANGPTL4; (-) strand; PAM type: YTN; PAM sequence: TTT
  source 1..20: mol_type = other DNA
tgaggagtctcactctgttg

SEQ ID NO: 14118 - DNA, 20 bp, synthetic construct
  misc_feature 1..20: note = Description of Artificial Sequence: Synthetic oligonucleotide
  misc_feature 1..20: note = Target: ANGPTL4; (-) strand; PAM type: YTN; PAM sequence: TTT
  source 1..20: mol_type = other DNA
ttgaggagtctcactctgtt

SEQ ID NO: 14119 - DNA, 20 bp, synthetic construct
  misc_feature 1..20: note = Description of Artificial Sequence: Synthetic oligonucleotide
  misc_feature 1..20: note = Target: ANGPTL4; (-) strand; PAM type: YTN; PAM sequence: TTT
  source 1..20: mol_type = other DNA
tttgaggagtctcactctgt

SEQ ID NO: 14120 - DNA, 20 bp, synthetic construct
  misc_feature 1..20: note = Description of Artificial Sequence: Synthetic oligonucleotide
  misc_feature 1..20: note = Target: ANGPTL4; (-) strand; PAM type: YTN; PAM sequence: TTT
  source 1..20: mol_type = other DNA
ttttgaggagtctcactctg

SEQ ID NO: 14121 - DNA, 20 bp, synthetic construct
  misc_feature 1..20: note = Description of Artificial Sequence: Synthetic oligonucleotide
  misc_feature 1..20: note = Target: ANGPTL4; (-) strand; PAM type: YTN; PAM sequence: TTA
  source 1..20: mol_type = other DNA
tttttttgaggagtctcact

SEQ ID NO: 14122 - DNA, 20 bp, synthetic construct
  misc_feature 1..20: note = Description of Artificial Sequence: Synthetic oligonucleotide
  misc_feature 1..20: note = Target: ANGPTL4; (-) strand; PAM type: YTN; PAM sequence: CTA
  source 1..20: mol_type = other DNA
ttatttttttgaggagtctc

SEQ ID NO: 14123 - DNA, 20 bp, synthetic construct
  misc_feature 1..20: note = Description of Artificial Sequence: Synthetic oligonucleotide
  misc_feature 1..20: note = Target: ANGPTL4; (-) strand; PAM type: YTN; PAM sequence: TTA
  source 1..20: mol_type = other DNA
tcgctattatttttttgagg

SEQ ID NO: 14124 - DNA, 20 bp, synthetic construct
  misc_feature 1..20: note = Description of Artificial Sequence: Synthetic oligonucleotide
  misc_feature 1..20: note = Target: ANGPTL4; (-) strand; PAM type: YTN; PAM sequence: TTT
  source 1..20: mol_type = other DNA
atcgctattatttttttgag

SEQ ID NO: 14125 - DNA, 20 bp, synthetic construct
  misc_feature 1..20: note = Description of Artificial Sequence: Synthetic oligonucleotide
  misc_feature 1..20: note = Target: ANGPTL4; (-) strand; PAM type: YTN; PAM sequence: TTT
  source 1..20: mol_type = other DNA
tatcgctattatttttttga

SEQ ID NO: 14126 - DNA, 20 bp, synthetic construct
  misc_feature 1..20: note = Description of Artificial Sequence: Synthetic oligonucleotide
  misc_feature 1..20: note = Target: ANGPTL4; (-) strand; PAM type: YTN; PAM sequence: TTA
  source 1..20: mol_type = other DNA
ttttatcgctattatttttt

SEQ ID NO: 14127 - DNA, 20 bp, synthetic construct
  misc_feature 1..20: note = Description of Artificial Sequence: Synthetic oligonucleotide
  misc_feature 1..20: note = Target: ANGPTL4; (-) strand; PAM type: YTN; PAM sequence: TTT
  source 1..20: mol_type = other DNA
attttatcgctattattttt

SEQ ID NO: 14128 - DNA, 20 bp, synthetic construct
  misc_feature 1..20: note = Description of Artificial Sequence: Synthetic oligonucleotide
  misc_feature 1..20: note = Target: ANGPTL4; (-) strand; PAM type: YTN; PAM sequence: TTT
  source 1..20: mol_type = other DNA
tattttatcgctattatttt

SEQ ID NO: 14129 - DNA, 20 bp, synthetic construct
  misc_feature 1..20: note = Description of Artificial Sequence: Synthetic oligonucleotide
  misc_feature 1..20: note = Target: ANGPTL4; (-) strand; PAM type: YTN; PAM sequence: TTT
  source 1..20: mol_type = other DNA
ttattttatcgctattattt

SEQ ID NO: 14130 - DNA, 20 bp, synthetic construct
  misc_feature 1..20: note = Description of Artificial Sequence: Synthetic oligonucleotide
  misc_feature 1..20: note = Target: ANGPTL4; (-) strand; PAM type: YTN; PAM sequence: TTA
  source 1..20: mol_type = other DNA
tttttattttatcgctatta

SEQ ID NO: 14131 - DNA, 20 bp, synthetic construct
  misc_feature 1..20: note = Description of Artificial Sequence: Synthetic oligonucleotide
  misc_feature 1..20: note = Target: ANGPTL4; (-) strand; PAM type: YTN; PAM sequence: TTT
  source 1..20: mol_type = other DNA
atttttattttatcgctatt

SEQ ID NO: 14132 - DNA, 20 bp, synthetic construct
  misc_feature 1..20: note = Description of Artificial Sequence: Synthetic oligonucleotide
  misc_feature 1..20: note = Target: ANGPTL4; (-) strand; PAM type: YTN; PAM sequence: CTT
  source 1..20: mol_type = other DNA
tatttttattttatcgctat

SEQ ID NO: 14133 - DNA, 20 bp, synthetic construct
  misc_feature 1..20: note = Description of Artificial Sequence: Synthetic oligonucleotide
  misc_feature 1..20: note = Target: ANGPTL4; (-) strand; PAM type: YTN; PAM sequence: CTG
  source 1..20: mol_type = other DNA
gctttatttttattttatcg

SEQ ID NO: 14134 - DNA, 20 bp, synthetic construct
  misc_feature 1..20: note = Description of Artificial Sequence: Synthetic oligonucleotide
  misc_feature 1..20: note = Target: ANGPTL4; (-) strand; PAM type: YTN; PAM sequence: CTA
  source 1..20: mol_type = other DNA
caagcgtgagtcaccgcacc

SEQ ID NO: 14135 - DNA, 20 bp, synthetic construct
  misc_feature 1..20: note = Description of Artificial Sequence: Synthetic oligonucleotide
  misc_feature 1..20: note = Target: ANGPTL4; (-) strand; PAM type: YTN; PAM sequence: CTG
  source 1..20: mol_type = other DNA
ggactacaagcgtgagtcac

SEQ ID NO: 14136 - DNA, 20 bp, synthetic construct
  misc_feature 1..20: note = Description of Artificial Sequence: Synthetic oligonucleotide
  misc_feature 1..20: note = Target: ANGPTL4; (-) strand; PAM type: YTN; PAM sequence: CTC
  source 1..20: mol_type = other DNA
ccaaagtgctgggactacaa

SEQ ID NO: 14137 - DNA, 20 bp, synthetic construct
  misc_feature 1..20: note = Description of Artificial Sequence: Synthetic oligonucleotide
  misc_feature 1..20: note = Target: ANGPTL4; (-) strand; PAM type: YTN; PAM sequence: CTC
  source 1..20: mol_type = other DNA
gccctcccaaagtgctggga

SEQ ID NO: 14138 - DNA, 20 bp, synthetic construct
  misc_feature 1..20: note = Description of Artificial Sequence: Synthetic oligonucleotide
  misc_feature 1..20: note = Target: ANGPTL4; (-) strand; PAM type: YTN; PAM sequence: CTG
  source 1..20: mol_type = other DNA
gcctcgccctcccaaagtgc

SEQ ID NO: 14139 - DNA, 20 bp, synthetic construct
  misc_feature 1..20: note = Description of Artificial Sequence: Synthetic oligonucleotide
  misc_feature 1..20: note = Target: ANGPTL4; (-) strand; PAM type: YTN; PAM sequence: CTC
  source 1..20: mol_type = other DNA
aggtgatccactggcctcgc

SEQ ID NO: 14140 - DNA, 20 bp, synthetic construct
  misc_feature 1..20: note = Description of Artificial Sequence: Synthetic oligonucleotide
  misc_feature 1..20: note = Target: ANGPTL4; (-) strand; PAM type: YTN; PAM sequence: CTG
  source 1..20: mol_type = other DNA
acctcaggtgatccactggc

SEQ ID NO: 14141 - DNA, 20 bp, synthetic construct
  misc_feature 1..20: note = Description of Artificial Sequence: Synthetic oligonucleotide
  misc_feature 1..20: note = Target: ANGPTL4; (-) strand; PAM type: YTN; PAM sequence: CTC
  source 1..20: mol_type = other DNA
ctgacctcaggtgatccact

SEQ ID NO: 14142 - DNA, 20 bp, synthetic construct
  misc_feature 1..20: note = Description of Artificial Sequence: Synthetic oligonucleotide
  misc_feature 1..20: note = Target: ANGPTL4; (-) strand; PAM type: YTN; PAM sequence: TTG
  source 1..20: mol_type = other DNA
aactcctgacctcaggtgat

SEQ ID NO: 14143 - DNA, 20 bp, synthetic construct
  misc_feature 1..20: note = Description of Artificial Sequence: Synthetic oligonucleotide
  misc_feature 1..20: note = Target: ANGPTL4; (-) strand; PAM type: YTN; PAM sequence: CTT
  source 1..20: mol_type = other DNA
gaactcctgacctcaggtga

SEQ ID NO: 14144 - DNA, 20 bp, synthetic construct
  misc_feature 1..20: note = Description of Artificial Sequence: Synthetic oligonucleotide
  misc_feature 1..20: note = Target: ANGPTL4; (-) strand; PAM type: YTN; PAM sequence: CTG
  source 1..20: mol_type = other DNA
gtcttgaactcctgacctca

SEQ ID NO: 14145 - DNA, 20 bp, synthetic construct
  misc_feature 1..20: note = Description of Artificial Sequence: Synthetic oligonucleotide
  misc_feature 1..20: note = Target: ANGPTL4; (-) strand; PAM type: YTN; PAM sequence: TTG
  source 1..20: mol_type = other DNA
gtcaggctggtcttgaactc

SEQ ID NO: 14146 - DNA, 20 bp, synthetic construct
  misc_feature 1..20: note = Description of Artificial Sequence: Synthetic oligonucleotide
  misc_feature 1..20: note = Target: ANGPTL4; (-) strand; PAM type: YTN; PAM sequence: CTG
  source 1..20: mol_type = other DNA
tgttggtcaggctggtcttg

SEQ ID NO: 14147 - DNA, 20 bp, synthetic construct
  misc_feature 1..20: note = Description of Artificial Sequence: Synthetic oligonucleotide
  misc_feature 1..20: note = Target: ANGPTL4; (-) strand; PAM type: YTN; PAM sequence: TTC
  source 1..20: mol_type = other DNA
actgtgttggtcaggctggt

SEQ ID NO: 14148 - DNA, 20 bp, synthetic construct
  misc_feature 1..20: note = Description of Artificial Sequence: Synthetic oligonucleotide
  misc_feature 1..20: note = Target: ANGPTL4; (-) strand; PAM type: YTN; PAM sequence: TTT
  source 1..20: mol_type = other DNA
cactgtgttggtcaggctgg

SEQ ID NO: 14149 - DNA, 20 bp, synthetic construct
  misc_feature 1..20: note = Description of Artificial Sequence: Synthetic oligonucleotide
  misc_feature 1..20: note = Target: ANGPTL4; (-) strand; PAM type: YTN; PAM sequence: TTA
  source 1..20: mol_type = other DNA
gtagagacggggtttcactg

SEQ ID NO: 14150 - DNA, 20 bp, synthetic construct
  misc_feature 1..20: note = Description of Artificial Sequence: Synthetic oligonucleotide
  misc_feature 1..20: note = Target: ANGPTL4; (-) strand; PAM type: YTN; PAM sequence: TTT
  source 1..20: mol_type = other DNA
agtagagacggggtttcact

SEQ ID NO: 14151 - DNA, 20 bp, synthetic construct
  misc_feature 1..20: note = Description of Artificial Sequence: Synthetic oligonucleotide
  misc_feature 1..20: note = Target: ANGPTL4; (-) strand; PAM type: YTN; PAM sequence: TTT
  source 1..20: mol_type = other DNA
tagtagagacggggtttcac

SEQ ID NO: 14152 - DNA, 20 bp, synthetic construct
  misc_feature 1..20: note = Description of Artificial Sequence: Synthetic oligonucleotide
  misc_feature 1..20: note = Target: ANGPTL4; (-) strand; PAM type: YTN; PAM sequence: TTT
  source 1..20: mol_type = other DNA
ttagtagagacggggtttca

SEQ ID NO: 14153 - DNA, 20 bp, synthetic construct
  misc_feature 1..20: note = Description of Artificial Sequence: Synthetic oligonucleotide
  misc_feature 1..20: note = Target: ANGPTL4; (-) strand; PAM type: YTN; PAM sequence: TTG
  source 1..20: mol_type = other DNA
tatttttagtagagacgggg

SEQ ID NO: 14154 - DNA, 20 bp, synthetic construct
  misc_feature 1..20: note = Description of Artificial Sequence: Synthetic oligonucleotide
  misc_feature 1..20: note = Target: ANGPTL4; (-) strand; PAM type: YTN; PAM sequence: TTT
  source 1..20: mol_type = other DNA
gtatttttagtagagacggg

SEQ ID NO: 14155 - DNA, 20 bp, synthetic construct
  misc_feature 1..20: note = Description of Artificial Sequence: Synthetic oligonucleotide
  misc_feature 1..20: note = Target: ANGPTL4; (-) strand; PAM type: YTN; PAM sequence: TTT
  source 1..20: mol_type = other DNA
tgtatttttagtagagacgg

SEQ ID NO: 14156 - DNA, 20 bp, synthetic construct
  misc_feature 1..20: note = Description of Artificial Sequence: Synthetic oligonucleotide
  misc_feature 1..20: note = Target: ANGPTL4; (-) strand; PAM type: YTN; PAM sequence: TTT
  source 1..20: mol_type = other DNA
ttgtatttttagtagagacg

SEQ ID NO: 14157 - DNA, 20 bp, synthetic construct
  misc_feature 1..20: note = Description of Artificial Sequence: Synthetic oligonucleotide
  misc_feature 1..20: note = Target: ANGPTL4; (-) strand; PAM type: YTN; PAM sequence: CTA
  source 1..20: mol_type = other DNA
atttttgtatttttagtaga

SEQ ID NO: 14158 - DNA, 20 bp, synthetic construct
  misc_feature 1..20: note = Description of Artificial Sequence: Synthetic oligonucleotide
  misc_feature 1..20: note = Target: ANGPTL4; (-) strand; PAM type: YTN; PAM sequence: TTA
  source 1..20: mol_type = other DNA
caggcgcccaccaccacacc

SEQ ID NO: 14159 - DNA, 20 bp, synthetic construct
  misc_feature 1..20: note = Description of Artificial Sequence: Synthetic oligonucleotide
  misc_feature 1..20: note = Target: ANGPTL4; (-) strand; PAM type: YTN; PAM sequence: CTG
  source 1..20: mol_type = other DNA
ggattacaggcgcccaccac

SEQ ID NO: 14160 - DNA, 20 bp, synthetic construct
  misc_feature 1..20: note = Description of Artificial Sequence: Synthetic oligonucleotide
  misc_feature 1..20: note = Target: ANGPTL4; (-) strand; PAM type: YTN; PAM sequence: CTC
  source 1..20: mol_type = other DNA
cccagtagctgggattacag

SEQ ID NO: 14161 - DNA, 20 bp, synthetic construct
  misc_feature 1..20: note = Description of Artificial Sequence: Synthetic oligonucleotide
  misc_feature 1..20: note = Target: ANGPTL4; (-) strand; PAM type: YTN; PAM sequence: CTC
  source 1..20: mol_type = other DNA
agcctccccagtagctggga

SEQ ID NO: 14162 - DNA, 20 bp, synthetic construct
  misc_feature 1..20: note = Description of Artificial Sequence: Synthetic oligonucleotide
  misc_feature 1..20: note = Target: ANGPTL4; (-) strand; PAM type: YTN; PAM sequence: CTG
  source 1..20: mol_type = other DNA
cctcagcctccccagtagct

SEQ ID NO: 14163 - DNA, 20 bp, synthetic construct
  misc_feature 1..20: note = Description of Artificial Sequence: Synthetic oligonucleotide
  misc_feature 1..20: note = Target: ANGPTL4; (-) strand; PAM type: YTN; PAM sequence: CTC
  source 1..20: mol_type = other DNA
ctgcctcagcctccccagta

SEQ ID NO: 14164 - DNA, 20 bp, synthetic construct
  misc_feature 1..20: note = Description of Artificial Sequence: Synthetic oligonucleotide
  misc_feature 1..20: note = Target: ANGPTL4; (-) strand; PAM type: YTN; PAM sequence: TTC
  source 1..20: mol_type = other DNA
tcctgcctcagcctccccag

SEQ ID NO: 14165 - DNA, 20 bp, synthetic construct
  misc_feature 1..20: note = Description of Artificial Sequence: Synthetic oligonucleotide
  misc_feature 1..20: note = Target: ANGPTL4; (-) strand; PAM type: YTN; PAM sequence: TTC
  source 1..20: mol_type = other DNA
aagaggttctcctgcctcag

SEQ ID NO: 14166 - DNA, 20 bp, synthetic construct
  misc_feature 1..20: note = Description of Artificial Sequence: Synthetic oligonucleotide
  misc_feature 1..20: note = Target: ANGPTL4; (-) strand; PAM type: YTN; PAM sequence: CTC
  source 1..20: mol_type = other DNA
ccgggttcaagaggttctcc

SEQ ID NO: 14167 - DNA, 20 bp, synthetic construct
  misc_feature 1..20: note = Description of Artificial Sequence: Synthetic oligonucleotide
  misc_feature 1..20: note = Target: ANGPTL4; (-) strand; PAM type: YTN; PAM sequence: CTC
  source 1..20: mol_type = other DNA
cgcctcccgggttcaagagg

SEQ ID NO: 14168 - DNA, 20 bp, synthetic construct
  misc_feature 1..20: note = Description of Artificial Sequence: Synthetic oligonucleotide
  misc_feature 1..20: note = Target: ANGPTL4; (-) strand; PAM type: YTN; PAM sequence: CTG
  source 1..20: mol_type = other DNA
caacctccgcctcccgggtt

SEQ ID NO: 14169 - DNA, 20 bp, synthetic construct
  misc_feature 1..20: note = Description of Artificial Sequence: Synthetic oligonucleotide
  misc_feature 1..20: note = Target: ANGPTL4; (-) strand; PAM type: YTN; PAM sequence: CTC
  source 1..20: mol_type = other DNA
actgcaacctccgcctcccg

SEQ ID NO: 14170 - DNA, 20 bp, synthetic construct
  misc_feature 1..20: note = Description of Artificial Sequence: Synthetic oligonucleotide
  misc_feature 1..20: note = Target: ANGPTL4; (-) strand; PAM type: YTN; PAM sequence: CTG
  source 1..20: mol_type = other DNA
gagtgcaatggcatgatccc

SEQ ID NO: 14171 - DNA, 20 bp, synthetic construct
  misc_feature 1..20: note = Description of Artificial Sequence: Synthetic oligonucleotide
  misc_feature 1..20: note = Target: ANGPTL4; (-) strand; PAM type: YTN; PAM sequence: CTG
  source 1..20: mol_type = other DNA
tcgcccaggctggagtgcaa

SEQ ID NO: 14172 - DNA, 20 bp, synthetic construct
  misc_feature 1..20: note = Description of Artificial Sequence: Synthetic oligonucleotide
  misc_feature 1..20: note = Target: ANGPTL4; (-) strand; PAM type: YTN; PAM sequence: CTC
  source 1..20: mol_type = other DNA
tgtcgcccaggctggagtgc

SEQ ID NO: 14173 - DNA, 20 bp, synthetic construct
  misc_feature 1..20: note = Description of Artificial Sequence: Synthetic oligonucleotide
  misc_feature 1..20: note = Target: ANGPTL4; (-) strand; PAM type: YTN; PAM sequence: TTG
  source 1..20: mol_type = other DNA
agatggagtcgagctctgtc

SEQ ID NO: 14174 - DNA, 20 bp, synthetic construct
  misc_feature 1..20: note = Description of Artificial Sequence: Synthetic oligonucleotide
  misc_feature 1..20: note = Target: ANGPTL4; (-) strand; PAM type: YTN; PAM sequence: TTT
  source 1..20: mol_type = other DNA
gagatggagtcgagctctgt

SEQ ID NO: 14175 - DNA, 20 bp, synthetic construct
  misc_feature 1..20: note = Description of Artificial Sequence: Synthetic oligonucleotide
  misc_feature 1..20: note = Target: ANGPTL4; (-) strand; PAM type: YTN; PAM sequence: TTT
  source 1..20: mol_type = other DNA
tgagatggagtcgagctctg

SEQ ID NO: 14176 - DNA, 20 bp, synthetic construct
  misc_feature 1..20: note = Description of Artificial Sequence: Synthetic oligonucleotide
  misc_feature 1..20: note = Target: ANGPTL4; (-) strand; PAM type: YTN; PAM sequence: TTA
  source 1..20: mol_type = other DNA
ttttgagatggagtcgagct

SEQ ID NO: 14177 - DNA, 20 bp, synthetic construct
  misc_feature 1..20: note = Description of Artificial Sequence: Synthetic oligonucleotide
  misc_feature 1..20: note = Target: ANGPTL4; (-) strand; PAM type: YTN; PAM sequence: TTA
  source 1..20: mol_type = other DNA
ttattttgagatggagtcga

SEQ ID NO: 14178 - DNA, 20 bp, synthetic construct
  misc_feature 1..20: note = Description of Artificial Sequence: Synthetic oligonucleotide
  misc_feature 1..20: note = Target: ANGPTL4; (-) strand; PAM type: YTN; PAM sequence: TTA
  source 1..20: mol_type = other DNA
ttattattttgagatggagt

SEQ ID NO: 14179 - DNA, 20 bp, synthetic construct
  misc_feature 1..20: note = Description of Artificial Sequence: Synthetic oligonucleotide
  misc_feature 1..20: note = Target: ANGPTL4; (-) strand; PAM type: YTN; PAM sequence: TTA
  source 1..20: mol_type = other DNA
ttattattattttgagatgg

SEQ ID NO: 14180 - DNA, 20 bp, synthetic construct
  misc_feature 1..20: note = Description of Artificial Sequence: Synthetic oligonucleotide
  misc_feature 1..20: note = Target: ANGPTL4; (-) strand; PAM type: YTN; PAM sequence: TTA
  source 1..20: mol_type = other DNA
ttattattattattttgaga

SEQ ID NO: 14181 - DNA, 20 bp, synthetic construct
  misc_feature 1..20: note = Description of Artificial Sequence: Synthetic oligonucleotide
  misc_feature 1..20: note = Target: ANGPTL4; (-) strand; PAM type: YTN; PAM sequence: TTT
  source 1..20: mol_type = other DNA
attattattattattttgag

SEQ ID NO: 14182 - DNA, 20 bp, synthetic construct
  misc_feature 1..20: note = Description of Artificial Sequence: Synthetic oligonucleotide
  misc_feature 1..20: note = Target: ANGPTL4; (-) strand; PAM type: YTN; PAM sequence: TTA
  source 1..20: mol_type = other DNA
tttattattattattatttt

SEQ ID NO: 14183 - DNA, 20 bp, synthetic construct
  misc_feature 1..20: note = Description of Artificial Sequence: Synthetic oligonucleotide
  misc_feature 1..20: note = Target: ANGPTL4; (-) strand; PAM type: YTN; PAM sequence: TTT
  source 1..20: mol_type = other DNA
atttattattattattattt

SEQ ID NO: 14184 - DNA, 20 bp, synthetic construct
  misc_feature 1..20: note = Description of Artificial Sequence: Synthetic oligonucleotide
  misc_feature 1..20: note = Target: ANGPTL4; (-) strand; PAM type: YTN; PAM sequence: TTT
  source 1..20: mol_type = other DNA
tatttattattattattatt

SEQ ID NO: 14185 - DNA, 20 bp, synthetic construct
  misc_feature 1..20: note = Description of Artificial Sequence: Synthetic oligonucleotide
  misc_feature 1..20: note = Target: ANGPTL4; (-) strand; PAM type: YTN; PAM sequence: TTA
  source 1..20: mol_type = other DNA
ttttatttattattattatt

SEQ ID NO: 14186 - DNA, 20 bp, synthetic construct
  misc_feature 1..20: note = Description of Artificial Sequence: Synthetic oligonucleotide
  misc_feature 1..20: note = Target: ANGPTL4; (-) strand; PAM type: YTN; PAM sequence: TTT
  source 1..20: mol_type = other DNA
attttatttattattattat

SEQ ID NO: 14187 - DNA, 20 bp, synthetic construct
  misc_feature 1..20: note = Description of Artificial Sequence: Synthetic oligonucleotide
  misc_feature 1..20: note = Target: ANGPTL4; (-) strand; PAM type: YTN; PAM sequence: TTT
  source 1..20: mol_type = other DNA
tattttatttattattatta

SEQ ID NO: 14188 - DNA, 20 bp, synthetic construct
  misc_feature 1..20: note = Description of Artificial Sequence: Synthetic oligonucleotide
  misc_feature 1..20: note = Target: ANGPTL4; (-) strand; PAM type: YTN; PAM sequence: TTG
  source 1..20: mol_type = other DNA
tattttattttatttattat

SEQ ID NO: 14189 - DNA, 20 bp, synthetic construct
  misc_feature 1..20: note = Description of Artificial Sequence: Synthetic oligonucleotide
  misc_feature 1..20: note = Target: ANGPTL4; (-) strand; PAM type: YTN; PAM sequence: TTT
  source 1..20: mol_type = other DNA
gtattttattttatttatta

SEQ ID NO: 14190 - DNA, 20 bp, synthetic construct
  misc_feature 1..20: note = Description of Artificial Sequence: Synthetic oligonucleotide
  misc_feature 1..20: note = Target: ANGPTL4; (-) strand; PAM type: YTN; PAM sequence: TTG
  source 1..20: mol_type = other DNA
tatttgtattttattttatt

SEQ ID NO: 14191 - DNA, 20 bp, synthetic construct
  misc_feature 1..20: note = Description of Artificial Sequence: Synthetic oligonucleotide
  misc_feature 1..20: note = Target: ANGPTL4; (-) strand; PAM type: YTN; PAM sequence: TTT
  source 1..20: mol_type = other DNA
gtatttgtattttattttat

SEQ ID NO: 14192 - DNA, 20 bp, synthetic construct
  misc_feature 1..20: note = Description of Artificial Sequence: Synthetic oligonucleotide
  misc_feature 1..20: note = Target: ANGPTL4; (-) strand; PAM type: YTN; PAM sequence: TTT
  source 1..20: mol_type = other DNA
tgtatttgtattttatttta

SEQ ID NO: 14193 - DNA, 20 bp, synthetic construct
  misc_feature 1..20: note = Description of Artificial Sequence: Synthetic oligonucleotide
  misc_feature 1..20: note = Target: ANGPTL4; (-) strand; PAM type: YTN; PAM sequence: TTT
  source 1..20: mol_type = other DNA
ttgtatttgtattttatttt

SEQ ID NO: 14194 - DNA, 20 bp, synthetic construct
  misc_feature 1..20: note = Description of Artificial Sequence: Synthetic oligonucleotide
  misc_feature 1..20: note = Target: ANGPTL4; (-) strand; PAM type: YTN; PAM sequence: CTA
  source 1..20: mol_type = other DNA
atttttgtatttgtatttta

SEQ ID NO: 14195 - DNA, 20 bp, synthetic construct
  misc_feature 1..20: note = Description of Artificial Sequence: Synthetic oligonucleotide
  misc_feature 1..20: note = Target: ANGPTL4; (-) strand; PAM type: YTN; PAM sequence: CTG
  source 1..20: mol_type = other DNA
gctaatttttgtatttgtat

SEQ ID NO: 14196 - DNA, 20 bp, synthetic construct
  misc_feature 1..20: note = Description of Artificial Sequence: Synthetic oligonucleotide
  misc_feature 1..20: note = Target: ANGPTL4; (-) strand; PAM type: YTN; PAM sequence: CTG
  source 1..20: mol_type = other DNA
ccaccacacctggctaattt

SEQ ID NO: 14197 - DNA, 20 bp, synthetic construct
  misc_feature 1..20: note = Description of Artificial Sequence: Synthetic oligonucleotide
  misc_feature 1..20: note = Target: ANGPTL4; (-) strand; PAM type: YTN; PAM sequence: CTC
  source 1..20: mol_type = other DNA
ccaagtagctgccaccacac

SEQ ID NO: 14198 - DNA, 20 bp, synthetic construct
  misc_feature 1..20: note = Description of Artificial Sequence: Synthetic oligonucleotide
  misc_feature 1..20: note = Target: ANGPTL4; (-) strand; PAM type: YTN; PAM sequence: CTC
  source 1..20: mol_type = other DNA
agcctcccaagtagctgcca

SEQ ID NO: 14199 - DNA, 20 bp, synthetic construct
  misc_feature 1..20: note = Description of Artificial Sequence: Synthetic oligonucleotide
  misc_feature 1..20: note = Target: ANGPTL4; (-) strand; PAM type: YTN; PAM sequence: TTG
  source 1..20: mol_type = other DNA
tgtctcagcctcccaagtag

SEQ ID NO: 14200 - DNA, 20 bp, synthetic construct
  misc_feature 1..20: note = Description of Artificial Sequence: Synthetic oligonucleotide
  misc_feature 1..20: note = Target: ANGPTL4; (-) strand; PAM type: YTN; PAM sequence: CTT
  source 1..20: mol_type = other DNA
gtgtctcagcctcccaagta

SEQ ID NO: 14201 - DNA, 20 bp, synthetic construct
  misc_feature 1..20: note = Description of Artificial Sequence: Synthetic oligonucleotide
  misc_feature 1..20: note = Target: ANGPTL4; (-) strand; PAM type: YTN; PAM sequence: TTC
  source 1..20: mol_type = other DNA
ttgtgtctcagcctcccaag

SEQ ID NO: 14202 - DNA, 20 bp, synthetic construct
  misc_feature 1..20: note = Description of Artificial Sequence: Synthetic oligonucleotide
  misc_feature 1..20: note = Target: ANGPTL4; (-) strand; PAM type: YTN; PAM sequence: CTC
  source 1..20: mol_type = other DNA
aagtgattcttgtgtctcag

SEQ ID NO: 14203 - DNA, 20 bp, synthetic construct
  misc_feature 1..20: note = Description of Artificial Sequence: Synthetic oligonucleotide
  misc_feature 1..20: note = Target: ANGPTL4; (-) strand; PAM type: YTN; PAM sequence: CTC
  source 1..20: mol_type = other DNA
ccagactcaagtgattcttg

SEQ ID NO: 14204 - DNA, 20 bp, synthetic construct
  misc_feature 1..20: note = Description of Artificial Sequence: Synthetic oligonucleotide
  misc_feature 1..20: note = Target: ANGPTL4; (-) strand; PAM type: YTN; PAM sequence: CTG
  source 1..20: mol_type = other DNA
cctcccagactcaagtgatt

SEQ ID NO: 14205 - DNA, 20 bp, synthetic construct
  misc_feature 1..20: note = Description of Artificial Sequence: Synthetic oligonucleotide
  misc_feature 1..20: note = Target: ANGPTL4; (-) strand; PAM type: YTN; PAM sequence: CTC
  source 1..20: mol_type = other DNA
tgcctcccagactcaagtga

SEQ ID NO: 14206 - DNA, 20 bp, synthetic construct
  misc_feature 1..20: note = Description of Artificial Sequence: Synthetic oligonucleotide
  misc_feature 1..20: note = Target: ANGPTL4; (-) strand; PAM type: YTN; PAM sequence: CTG
  source 1..20: mol_type = other DNA
caacctctgcctcccagact

SEQ ID NO: 14207 - DNA, 20 bp, synthetic construct
  misc_feature 1..20: note = Description of Artificial Sequence: Synthetic oligonucleotide
  misc_feature 1..20: note = Target: ANGPTL4; (-) strand; PAM type: YTN; PAM sequence: CTC
  source 1..20: mol_type = other DNA
actgcaacctctgcctccca

SEQ ID NO: 14208 - DNA, 20 bp, synthetic construct
  misc_feature 1..20: note = Description of Artificial Sequence: Synthetic oligonucleotide
  misc_feature 1..20: note = Target: ANGPTL4; (-) strand; PAM type: YTN; PAM sequence: TTG
  source 1..20: mol_type = other DNA
gctcactgcaacctctgcct

SEQ ID NO: 14209 - DNA, 20 bp, synthetic construct
  misc_feature 1..20: note = Description of Artificial Sequence: Synthetic oligonucleotide
  misc_feature 1..20: note = Target: ANGPTL4; (-) strand; PAM type: YTN; PAM sequence: CTT
  source 1..20: mol_type = other DNA
ggctcactgcaacctctgcc

SEQ ID NO: 14210 - DNA, 20 bp, synthetic construct
  misc_feature 1..20: note = Description of Artificial Sequence: Synthetic oligonucleotide
  misc_feature 1..20: note = Target: ANGPTL4; (-) strand; PAM type: YTN; PAM sequence: TTG
  source 1..20: mol_type = other DNA
gagtgcagtggcgcaatctt

SEQ ID NO: 14211 - DNA, 20 bp, synthetic construct
  misc_feature 1..20: note = Description of Artificial Sequence: Synthetic oligonucleotide
  misc_feature 1..20: note = Target: ANGPTL4; (-) strand; PAM type: YTN; PAM sequence: CTG
  source 1..20: mol_type = other DNA
tcacccaggttggagtgcag

SEQ ID NO: 14212 - DNA, 20 bp, synthetic construct
  misc_feature 1..20: note = Description of Artificial Sequence: Synthetic oligonucleotide
  misc_feature 1..20: note = Target: ANGPTL4; (-) strand; PAM type: YTN; PAM sequence: CTC
  source 1..20: mol_type = other DNA
tgtcacccaggttggagtgc

SEQ ID NO: 14213 - DNA, 20 bp, synthetic construct
  misc_feature 1..20: note = Description of Artificial Sequence: Synthetic oligonucleotide
  misc_feature 1..20: note = Target: ANGPTL4; (-) strand; PAM type: YTN; PAM sequence: CTC
  source 1..20: mol_type = other DNA
gctctgtcacccaggttgga

SEQ ID NO: 14214 - DNA, 20 bp, synthetic construct
  misc_feature 1..20: note = Description of Artificial Sequence: Synthetic oligonucleotide
  misc_feature 1..20: note = Target: ANGPTL4; (-) strand; PAM type: YTN; PAM sequence: TTC
  source 1..20: mol_type = other DNA
agacagagtctcgctctgtc

SEQ ID NO: 14215 - DNA, 20 bp, synthetic construct
  misc_feature 1..20: note = Description of Artificial Sequence: Synthetic oligonucleotide
  misc_feature 1..20: note = Target: ANGPTL4; (-) strand; PAM type: YTN; PAM sequence: TTT
  source 1..20: mol_type = other DNA
cagacagagtctcgctctgt

SEQ ID NO: 14216 - DNA, 20 bp, synthetic construct
  misc_feature 1..20: note = Description of Artificial Sequence: Synthetic oligonucleotide
  misc_feature 1..20: note = Target: ANGPTL4; (-) strand; PAM type: YTN; PAM sequence: TTT
  source 1..20: mol_type = other DNA
tcagacagagtctcgctctg

SEQ ID NO: 14217 - DNA, 20 bp, synthetic construct
  misc_feature 1..20: note = Description of Artificial Sequence: Synthetic oligonucleotide
  misc_feature 1..20: note = Target: ANGPTL4; (-) strand; PAM type: YTN; PAM sequence: TTT
  source 1..20: mol_type = other DNA
ttcagacagagtctcgctct

SEQ ID NO: 14218 - DNA, 20 bp, synthetic construct
  misc_feature 1..20: note = Description of Artificial Sequence: Synthetic oligonucleotide
  misc_feature 1..20: note = Target: ANGPTL4; (-) strand; PAM type: YTN; PAM sequence: TTT
  source 1..20: mol_type = other DNA
tttcagacagagtctcgctc

SEQ ID NO: 14219 - DNA, 20 bp, synthetic construct
  misc_feature 1..20: note = Description of Artificial Sequence: Synthetic oligonucleotide
  misc_feature 1..20: note = Target: ANGPTL4; (-) strand; PAM type: YTN; PAM sequence: TTA
  source 1..20: mol_type = other DNA
ttttttcagacagagtctcg

SEQ ID NO: 14220 - DNA, 20 bp, synthetic construct
  misc_feature 1..20: note = Description of Artificial Sequence: Synthetic oligonucleotide
  misc_feature 1..20: note = Target: ANGPTL4; (-) strand; PAM type: YTN; PAM sequence: TTT
  source 1..20: mol_type = other DNA
attttttcagacagagtctc

SEQ ID NO: 14221 - DNA, 20 bp, synthetic construct
  misc_feature 1..20: note = Description of Artificial Sequence: Synthetic oligonucleotide
  misc_feature 1..20: note = Target: ANGPTL4; (-) strand; PAM type: YTN; PAM sequence: TTT
  source 1..20: mol_type = other DNA
tattttttcagacagagtct

SEQ ID NO: 14222 - DNA, 20 bp, synthetic construct
  misc_feature 1..20: note = Description of Artificial Sequence: Synthetic oligonucleotide
  misc_feature 1..20: note = Target: ANGPTL4; (-) strand; PAM type: YTN; PAM sequence: TTT
  source 1..20: mol_type = other DNA
ttattttttcagacagagtc

SEQ ID NO: 14223 - DNA, 20 bp, synthetic construct
  misc_feature 1..20: note = Description of Artificial Sequence: Synthetic oligonucleotide
  misc_feature 1..20: note = Target: ANGPTL4; (-) strand; PAM type: YTN; PAM sequence: TTT
  source 1..20: mol_type = other DNA
tttattttttcagacagagt

SEQ ID NO: 14224 - DNA, 20 bp, synthetic construct
  misc_feature 1..20: note = Description of Artificial Sequence: Synthetic oligonucleotide
  misc_feature 1..20: note = Target: ANGPTL4; (-) strand; PAM type: YTN; PAM sequence: TTA
  source 1..20: mol_type = other DNA
ttttttattttttcagacag

SEQ ID NO: 14225 - DNA, 20 bp, synthetic construct
  misc_feature 1..20: note = Description of Artificial Sequence: Synthetic oligonucleotide
  misc_feature 1..20: note = Target: ANGPTL4; (-) strand; PAM type: YTN; PAM sequence: CTT
  source 1..20: mol_type = other DNA
attttttattttttcagaca

SEQ ID NO: 14226 - DNA, 20 bp, synthetic construct
  misc_feature 1..20: note = Description of Artificial Sequence: Synthetic oligonucleotide
  misc_feature 1..20: note = Target: ANGPTL4; (-) strand; PAM type: YTN; PAM sequence: CTG
  source 1..20: mol_type = other DNA
gcttattttttattttttca

SEQ ID NO: 14227 - DNA, 20 bp, synthetic construct
  misc_feature 1..20: note = Description of Artificial Sequence: Synthetic oligonucleotide
  misc_feature 1..20: note = Target: ANGPTL4; (-) strand; PAM type: YTN; PAM sequence: CTA
  source 1..20: mol_type = other DNA
tgcctggcttattttttatt

SEQ ID NO: 14228 - DNA, 20 bp, synthetic construct
  misc_feature 1..20: note = Description of Artificial Sequence: Synthetic oligonucleotide
  misc_feature 1..20: note = Target: ANGPTL4; (-) strand; PAM type: YTN; PAM sequence: CTC
  source 1..20: mol_type = other DNA
tatgcctggcttatttttta

SEQ ID NO: 14229 - DNA, 20 bp, synthetic construct
  misc_feature 1..20: note = Description of Artificial Sequence: Synthetic oligonucleotide
  misc_feature 1..20: note = Target: ANGPTL4; (-) strand; PAM type: YTN; PAM sequence: CTA
  source 1..20: mol_type = other DNA
cagtcatgcagctctatgcc

SEQ ID NO: 14230 - DNA, 20 bp, synthetic construct
  misc_feature 1..20: note = Description of Artificial Sequence: Synthetic oligonucleotide
  misc_feature 1..20: note = Target: ANGPTL4; (-) strand; PAM type: YTN; PAM sequence: CTG
  source 1..20: mol_type = other DNA
ggactacagtcatgcagctc

SEQ ID NO: 14231 - DNA, 20 bp, synthetic construct
  misc_feature 1..20: note = Description of Artificial Sequence: Synthetic oligonucleotide
  misc_feature 1..20: note = Target: ANGPTL4; (-) strand; PAM type: YTN; PAM sequence: CTG
  source 1..20: mol_type = other DNA
tgtagctgggactacagtca

SEQ ID NO: 14232 - DNA, 20 bp, synthetic construct
  misc_feature 1..20: note = Description of Artificial Sequence: Synthetic oligonucleotide
  misc_feature 1..20: note = Target: ANGPTL4; (-) strand; PAM type: YTN; PAM sequence: CTC
  source 1..20: mol_type = other DNA
ctgtgtagctgggactacag

SEQ ID NO: 14233 - DNA, 20 bp, synthetic construct
  misc_feature 1..20: note = Description of Artificial Sequence: Synthetic oligonucleotide
  misc_feature 1..20: note = Target: ANGPTL4; (-) strand; PAM type: YTN; PAM sequence: TTC
  source 1..20: mol_type = other DNA
agcctcctgtgtagctggga

SEQ ID NO: 14234 - DNA, 20 bp, synthetic construct
  misc_feature 1..20: note = Description of Artificial Sequence: Synthetic oligonucleotide
  misc_feature 1..20: note = Target: ANGPTL4; (-) strand; PAM type: YTN; PAM sequence: TTT
  source 1..20: mol_type = other DNA
cagcctcctgtgtagctggg

SEQ ID NO: 14235 - DNA, 20 bp, synthetic construct
  misc_feature 1..20: note = Description of Artificial Sequence: Synthetic oligonucleotide
  misc_feature 1..20: note = Target: ANGPTL4; (-) strand; PAM type: YTN; PAM sequence: TTT
  source 1..20: mol_type = other DNA
tcagcctcctgtgtagctgg

SEQ ID NO: 14236 - DNA, 20 bp, synthetic construct
  misc_feature 1..20: note = Description of Artificial Sequence: Synthetic oligonucleotide
  misc_feature 1..20: note = Target: ANGPTL4; (-) strand; PAM type: YTN; PAM sequence: CTG
  source 1..20: mol_type = other DNA
ttttcagcctcctgtgtagc

SEQ ID NO: 14237 - DNA, 20 bp, synthetic construct
  misc_feature 1..20: note = Description of Artificial Sequence: Synthetic oligonucleotide
  misc_feature 1..20: note = Target: ANGPTL4; (-) strand; PAM type: YTN; PAM sequence: CTC
  source 1..20: mol_type = other DNA
ctgttttcagcctcctgtgt

SEQ ID NO: 14238 - DNA, 20 bp, synthetic construct
  misc_feature 1..20: note = Description of Artificial Sequence: Synthetic oligonucleotide
  misc_feature 1..20: note = Target: ANGPTL4; (-) strand; PAM type: YTN; PAM sequence: CTG
  source 1..20: mol_type = other DNA
gggtcaggcgatcctcctgt

SEQ ID NO: 14239 - DNA, 20 bp, synthetic construct
  misc_feature 1..20: note = Description of Artificial Sequence: Synthetic oligonucleotide
  misc_feature 1..20: note = Target: ANGPTL4; (-) strand; PAM type: YTN; PAM sequence: CTC
  source 1..20: mol_type = other DNA
ctggggtcaggcgatcctcc

SEQ ID NO: 14240 - DNA, 20 bp, synthetic construct
  misc_feature 1..20: note = Description of Artificial Sequence: Synthetic oligonucleotide
  misc_feature 1..20: note = Target: ANGPTL4; (-) strand; PAM type: YTN; PAM sequence: CTC
  source 1..20: mol_type = other DNA
caactcctggggtcaggcga

SEQ ID NO: 14241 - DNA, 20 bp, synthetic construct
  misc_feature 1..20: note = Description of Artificial Sequence: Synthetic oligonucleotide
  misc_feature 1..20: note = Target: ANGPTL4; (-) strand; PAM type: YTN; PAM sequence: CTG
  source 1..20: mol_type = other DNA
cagcctccaactcctggggt

SEQ ID NO: 14242 - DNA, 20 bp, synthetic construct
  misc_feature 1..20: note = Description of Artificial Sequence: Synthetic oligonucleotide
  misc_feature 1..20: note = Target: ANGPTL4; (-) strand; PAM type: YTN; PAM sequence: CTC
  source 1..20: mol_type = other DNA
actgcagcctccaactcctg

SEQ ID NO: 14243 - DNA, 20 bp, synthetic construct
  misc_feature 1..20: note = Description of Artificial Sequence: Synthetic oligonucleotide
  misc_feature 1..20: note = Target: ANGPTL4; (-) strand; PAM type: YTN; PAM sequence: CTG
  source 1..20: mol_type = other DNA
tcacagctcactgcagcctc

SEQ ID NO: 14244 - DNA, 20 bp, synthetic construct
  misc_feature 1..20: note = Description of Artificial Sequence: Synthetic oligonucleotide
  misc_feature 1..20: note = Target: ANGPTL4; (-) strand; PAM type: YTN; PAM sequence: CTG
  source 1..20: mol_type = other DNA
gagtgcagtggtgctgtcac

SEQ ID NO: 14245 - DNA, 20 bp, synthetic construct
  misc_feature 1..20: note = Description of Artificial Sequence: Synthetic oligonucleotide
  misc_feature 1..20: note = Target: ANGPTL4; (-) strand; PAM type: YTN; PAM sequence: CTC
  source 1..20: mol_type = other DNA
gcccaggctggagtgcagtg

SEQ ID NO: 14246 - DNA, 20 bp, synthetic construct
  misc_feature 1..20: note = Description of Artificial Sequence: Synthetic oligonucleotide
  misc_feature 1..20: note = Target: ANGPTL4; (-) strand; PAM type: YTN; PAM sequence: CTC
  source 1..20: mol_type = other DNA
tcgcccaggctggagtgcag

SEQ ID NO: 14247 - DNA, 20 bp, synthetic construct
  misc_feature 1..20: note = Description of Artificial Sequence: Synthetic oligonucleotide
  misc_feature 1..20: note = Target: ANGPTL4; (-) strand; PAM type: YTN; PAM sequence: TTC
  source 1..20: mol_type = other DNA
tctcgcccaggctggagtgc

SEQ ID NO: 14248 - DNA, 20 bp, synthetic construct
  misc_feature 1..20: note = Description of Artificial Sequence: Synthetic oligonucleotide
  misc_feature 1..20: note = Target: ANGPTL4; (-) strand; PAM type: YTN; PAM sequence: CTC
  source 1..20: mol_type = other DNA
gttctctcgcccaggctgga

SEQ ID NO: 14249 - DNA, 20 bp, synthetic construct
  misc_feature 1..20: note = Description of Artificial Sequence: Synthetic oligonucleotide
  misc_feature 1..20: note = Target: ANGPTL4; (-) strand; PAM type: YTN; PAM sequence: TTC
  source 1..20: mol_type = other DNA
ccaatgacggggtctcgttc

SEQ ID NO: 14250 - DNA, 20 bp, synthetic construct
  misc_feature 1..20: note = Description of Artificial Sequence: Synthetic oligonucleotide
  misc_feature 1..20: note = Target: ANGPTL4; (-) strand; PAM type: YTN; PAM sequence: TTT
  source 1..20: mol_type = other DNA
cccaatgacggggtctcgtt

SEQ ID NO: 14251 - DNA, 20 bp, synthetic construct
  misc_feature 1..20: note = Description of Artificial Sequence: Synthetic oligonucleotide
  misc_feature 1..20: note = Target: ANGPTL4; (-) strand; PAM type: YTN; PAM sequence: TTT
  source 1..20: mol_type = other DNA
tcccaatgacggggtctcgt

SEQ ID NO: 14252 - DNA, 20 bp, synthetic construct
  misc_feature 1..20: note = Description of Artificial Sequence: Synthetic oligonucleotide
  misc_feature 1..20: note = Target: ANGPTL4; (-) strand; PAM type: YTN; PAM sequence: TTT
  source 1..20: mol_type = other DNA
ttcccaatgacggggtctcg

SEQ ID NO: 14253 - DNA, 20 bp, synthetic construct
  misc_feature 1..20: note = Description of Artificial Sequence: Synthetic oligonucleotide
  misc_feature 1..20: note = Target: ANGPTL4; (-) strand; PAM type: YTN; PAM sequence: TTT
  source 1..20: mol_type = other DNA
tttcccaatgacggggtctc

SEQ ID NO: 14254 - DNA, 20 bp, synthetic construct
  misc_feature 1..20: note = Description of Artificial Sequence: Synthetic oligonucleotide
  misc_feature 1..20: note = Target: ANGPTL4; (-) strand; PAM type: YTN; PAM sequence: TTT
  source 1..20: mol_type = other DNA
ttttcccaatgacggggtct

SEQ ID NO: 14255 - DNA, 20 bp, synthetic construct
  misc_feature 1..20: note = Description of Artificial Sequence: Synthetic oligonucleotide
  misc_feature 1..20: note = Target: ANGPTL4; (-) strand; PAM type: YTN; PAM sequence: TTT
  source 1..20: mol_type = other DNA
tttttcccaatgacggggtc

SEQ ID NO: 14256 - DNA, 20 bp, synthetic construct
  misc_feature 1..20: note = Description of Artificial Sequence: Synthetic oligonucleotide
  misc_feature 1..20: note = Target: ANGPTL4; (-) strand; PAM type: YTN; PAM sequence: CTT
  source 1..20: mol_type = other DNA
ttttttcccaatgacggggt

SEQ ID NO: 14257 - DNA, 20 bp, synthetic construct
  misc_feature 1..20: note = Description of Artificial Sequence: Synthetic oligonucleotide
  misc_feature 1..20: note = Target: ANGPTL4; (-) strand; PAM type: YTN; PAM sequence: TTC
  source 1..20: mol_type = other DNA
ttttttttcccaatgacggg

SEQ ID NO: 14258 - DNA, 20 bp, synthetic construct
  misc_feature 1..20: note = Description of Artificial Sequence: Synthetic oligonucleotide
  misc_feature 1..20: note = Target: ANGPTL4; (-) strand; PAM type: YTN; PAM sequence: TTT
  source 1..20: mol_type = other DNA
cttttttttcccaatgacgg

SEQ ID NO: 14259 - DNA, 20 bp, synthetic construct
  misc_feature 1..20: note = Description of Artificial Sequence: Synthetic oligonucleotide
  misc_feature 1..20: note = Target: ANGPTL4; (-) strand; PAM type: YTN; PAM sequence: TTT
  source 1..20: mol_type = other DNA
tcttttttttcccaatgacg

SEQ ID NO: 14260 - DNA, 20 bp, synthetic construct
  misc_feature 1..20: note = Description of Artificial Sequence: Synthetic oligonucleotide
  misc_feature 1..20: note = Target: ANGPTL4; (-) strand; PAM type: YTN; PAM sequence: TTT
  source 1..20: mol_type = other DNA
ttcttttttttcccaatgac

SEQ ID NO: 14261 - DNA, 20 bp, synthetic construct
  misc_feature 1..20: note = Description of Artificial Sequence: Synthetic oligonucleotide
  misc_feature 1..20: note = Target: ANGPTL4; (-) strand; PAM type: YTN; PAM sequence: TTT
  source 1..20: mol_type = other DNA
tttcttttttttcccaatga

SEQ ID NO: 14262 - DNA, 20 bp, synthetic construct
  misc_feature 1..20: note = Description of Artificial Sequence: Synthetic oligonucleotide
  misc_feature 1..20: note = Target: ANGPTL4; (-) strand; PAM type: YTN; PAM sequence: CTT
  source 1..20: mol_type = other DNA
ttttcttttttttcccaatg

SEQ ID NO: 14263 - DNA, 20 bp, synthetic construct
  misc_feature 1..20: note = Description of Artificial Sequence: Synthetic oligonucleotide
  misc_feature 1..20: note = Target: ANGPTL4; (-) strand; PAM type: YTN; PAM sequence: TTC
  source 1..20: mol_type = other DNA
ttttttcttttttttcccaa

SEQ ID NO: 14264 - DNA, 20 bp, synthetic construct
  misc_feature 1..20: note = Description of Artificial Sequence: Synthetic oligonucleotide
  misc_feature 1..20: note = Target: ANGPTL4; (-) strand; PAM type: YTN; PAM sequence: TTT
  source 1..20: mol_type = other DNA
cttttttcttttttttccca

SEQ ID NO: 14265 - DNA, 20 bp, synthetic construct
  misc_feature 1..20: note = Description of Artificial Sequence: Synthetic oligonucleotide
  misc_feature 1..20: note = Target: ANGPTL4; (-) strand; PAM type: YTN; PAM sequence: CTT
  source 1..20: mol_type = other DNA
tcttttttcttttttttccc

SEQ ID NO: 14266 - DNA, 20 bp, synthetic construct
  misc_feature 1..20: note = Description of Artificial Sequence: Synthetic oligonucleotide
  misc_feature 1..20: note = Target: ANGPTL4; (-) strand; PAM type: YTN; PAM sequence: CTG
  source 1..20: mol_type = other DNA
aggccaggcaagggagtctt

SEQ ID NO: 14267 - DNA, 20 bp, synthetic construct
  misc_feature 1..20: note = Description of Artificial Sequence: Synthetic oligonucleotide
  misc_feature 1..20: note = Target: ANGPTL4; (-) strand; PAM type: YTN; PAM sequence: CTC
  source 1..20: mol_type = other DNA
catccgctgaggccaggcaa

SEQ ID NO: 14268 - DNA, 20 bp, synthetic construct
  misc_feature 1..20: note = Description of Artificial Sequence: Synthetic oligonucleotide
  misc_feature 1..20: note = Target: ANGPTL4; (-) strand; PAM type: YTN; PAM sequence: TTC
  source 1..20: mol_type = other DNA
caaatctccatccgctgagg

SEQ ID NO: 14269 - DNA, 20 bp, synthetic construct
  misc_feature 1..20: note = Description of Artificial Sequence: Synthetic oligonucleotide
  misc_feature 1..20: note = Target: ANGPTL4; (-) strand; PAM type: YTN; PAM sequence: CTT
  source 1..20: mol_type = other DNA
ccaaatctccatccgctgag

SEQ ID NO: 14270 - DNA, 20 bp, synthetic construct
  misc_feature 1..20: note = Description of Artificial Sequence: Synthetic oligonucleotide
  misc_feature 1..20: note = Target: ANGPTL4; (-) strand; PAM type: YTN; PAM sequence: CTC
  source 1..20: mol_type = other DNA
atccatccttccaaatctcc

SEQ ID NO: 14271 - DNA, 20 bp, synthetic construct
  misc_feature 1..20: note = Description of Artificial Sequence: Synthetic oligonucleotide
  misc_feature 1..20: note = Target: ANGPTL4; (-) strand; PAM type: YTN; PAM sequence: TTC
  source 1..20: mol_type = other DNA
atccactcatccatccttcc

SEQ ID NO: 14272 - DNA, 20 bp, synthetic construct
  misc_feature 1..20: note = Description of Artificial Sequence: Synthetic oligonucleotide
  misc_feature 1..20: note = Target: ANGPTL4; (-) strand; PAM type: YTN; PAM sequence: TTA
  source 1..20: mol_type = other DNA
attcatccactcatccatcc

SEQ ID NO: 14273 - DNA, 20 bp, synthetic construct
  misc_feature 1..20: note = Description of Artificial Sequence: Synthetic oligonucleotide
  misc_feature 1..20: note = Target: ANGPTL4; (-) strand; PAM type: YTN; PAM sequence: CTT
  source 1..20: mol_type = other DNA
aattcatccactcatccatc

SEQ ID NO: 14274 - DNA, 20 bp, synthetic construct
  misc_feature 1..20: note = Description of Artificial Sequence: Synthetic oligonucleotide
  misc_feature 1..20: note = Target: ANGPTL4; (-) strand; PAM type: YTN; PAM sequence: CTC
  source 1..20: mol_type = other DNA
ttaattcatccactcatcca

SEQ ID NO: 14275 - DNA, 20 bp, synthetic construct
  misc_feature 1..20: note = Description of Artificial Sequence: Synthetic oligonucleotide
  misc_feature 1..20: note = Target: ANGPTL4; (-) strand; PAM type: YTN; PAM sequence: CTA
  source 1..20: mol_type = other DNA
ccccaacctcttaattcatc

SEQ ID NO: 14276 - DNA, 20 bp, synthetic construct
  misc_feature 1..20: note = Description of Artificial Sequence: Synthetic oligonucleotide
  misc_feature 1..20: note = Target: ANGPTL4; (-) strand; PAM type: YTN; PAM sequence: TTG
  source 1..20: mol_type = other DNA
cctaccccaacctcttaatt

SEQ ID NO: 14277 - DNA, 20 bp, synthetic construct
  misc_feature 1..20: note = Description of Artificial Sequence: Synthetic oligonucleotide
  misc_feature 1..20: note = Target: ANGPTL4; (-) strand; PAM type: YTN; PAM sequence: CTT
  source 1..20: mol_type = other DNA
gcctaccccaacctcttaat

SEQ ID NO: 14278 - DNA, 20 bp, synthetic construct
  misc_feature 1..20: note = Description of Artificial Sequence: Synthetic oligonucleotide
  misc_feature 1..20: note = Target: ANGPTL4; (-) strand; PAM type: YTN; PAM sequence: TTG
  source 1..20: mol_type = other DNA
gtgaggacccagcttgccta

SEQ ID NO: 14279 - DNA, 20 bp, synthetic construct
  misc_feature 1..20: note = Description of Artificial Sequence: Synthetic oligonucleotide
  misc_feature 1..20: note = Target: ANGPTL4; (-) strand; PAM type: YTN; PAM sequence: CTT
  source 1..20: mol_type = other DNA
ggtgaggacccagcttgcct

SEQ ID NO: 14280 - DNA, 20 bp, synthetic construct
  misc_feature 1..20: note = Description of Artificial Sequence: Synthetic oligonucleotide
  misc_feature 1..20: note = Target: ANGPTL4; (-) strand; PAM type: YTN; PAM sequence: CTG
  source 1..20: mol_type = other DNA
gggaggggtgaaaaccttgg

SEQ ID NO: 14281 - DNA, 20 bp, synthetic construct
  misc_feature 1..20: note = Description of Artificial Sequence: Synthetic oligonucleotide
  misc_feature 1..20: note = Target: ANGPTL4; (-) strand; PAM type: YTN; PAM sequence: TTG
  source 1..20: mol_type = other DNA
tgtctggggaggggtgaaaa

SEQ ID NO: 14282 - DNA, 20 bp, synthetic construct
  misc_feature 1..20: note = Description of Artificial Sequence: Synthetic oligonucleotide
  misc_feature 1..20: note = Target: ANGPTL4; (-) strand; PAM type: YTN; PAM sequence: TTG
  source 1..20: mol_type = other DNA
agttgtgtctggggaggggt

SEQ ID NO: 14283 - DNA, 20 bp, synthetic construct
  misc_feature 1..20: note = Description of Artificial Sequence: Synthetic oligonucleotide
  misc_feature 1..20: note = Target: ANGPTL4; (-) strand; PAM type: YTN; PAM sequence: CTT
  source 1..20: mol_type = other DNA
gagttgtgtctggggagggg

SEQ ID NO: 14284 - DNA, 20 bp, synthetic construct
  misc_feature 1..20: note = Description of Artificial Sequence: Synthetic oligonucleotide
  misc_feature 1..20: note = Target: ANGPTL4; (-) strand; PAM type: YTN; PAM sequence: CTG
  source 1..20: mol_type = other DNA
agccttgagttgtgtctggg

SEQ ID NO: 14285 - DNA, 20 bp, synthetic construct
  misc_feature 1..20: note = Description of Artificial Sequence: Synthetic oligonucleotide
  misc_feature 1..20: note = Target: ANGPTL4; (-) strand; PAM type: YTN; PAM sequence: TTC
  source 1..20: mol_type = other DNA
tgagccttgagttgtgtctg

SEQ ID NO: 14286 - DNA, 20 bp, synthetic construct
  misc_feature 1..20: note = Description of Artificial Sequence: Synthetic oligonucleotide
  misc_feature 1..20: note = Target: ANGPTL4; (-) strand; PAM type: YTN; PAM sequence: CTG
  source 1..20: mol_type = other DNA
ttctgagccttgagttgtgt

SEQ ID NO: 14287 - DNA, 20 bp, synthetic construct
  misc_feature 1..20: note = Description of Artificial Sequence: Synthetic oligonucleotide
  misc_feature 1..20: note = Target: ANGPTL4; (-) strand; PAM type: YTN; PAM sequence: CTG
  source 1..20: mol_type = other DNA
ctgttctgagccttgagttg

SEQ ID NO: 14288 - DNA, 20 bp, synthetic construct
  misc_feature 1..20: note = Description of Artificial Sequence: Synthetic oligonucleotide
  misc_feature 1..20: note = Target: ANGPTL4; (-) strand; PAM type: YTN; PAM sequence: CTG
  source 1..20: mol_type = other DNA
gatcctgctgttctgagcct

SEQ ID NO: 14289 - DNA, 20 bp, synthetic construct
  misc_feature 1..20: note = Description of Artificial Sequence: Synthetic oligonucleotide
  misc_feature 1..20: note = Target: ANGPTL4; (-) strand; PAM type: YTN; PAM sequence: TTG
  source 1..20: mol_type = other DNA
ctggatcctgctgttctgag

SEQ ID NO: 14290 - DNA, 20 bp, synthetic construct
  misc_feature 1..20: note = Description of Artificial Sequence: Synthetic oligonucleotide
  misc_feature 1..20: note = Target: ANGPTL4; (-) strand; PAM type: YTN; PAM sequence: TTG
  source 1..20: mol_type = other DNA
tggaagagttgctggatcct

SEQ ID NO: 14291 - DNA, 20 bp, synthetic construct
  misc_feature 1..20: note = Description of Artificial Sequence: Synthetic oligonucleotide
  misc_feature 1..20: note = Target: ANGPTL4; (-) strand; PAM type: YTN; PAM sequence: CTT
  source 1..20: mol_type = other DNA
gtggaagagttgctggatcc

SEQ ID NO: 14292 - DNA, 20 bp, synthetic construct
  misc_feature 1..20: note = Description of Artificial Sequence: Synthetic oligonucleotide
  misc_feature 1..20: note = Target: ANGPTL4; (-) strand; PAM type: YTN; PAM sequence: CTG
  source 1..20: mol_type = other DNA
ggccaccttgtggaagagtt

SEQ ID NO: 14293 - DNA, 20 bp, synthetic construct
  misc_feature 1..20: note = Description of Artificial Sequence: Synthetic oligonucleotide
  misc_feature 1..20: note = Target: ANGPTL4; (-) strand; PAM type: YTN; PAM sequence: CTG
  source 1..20: mol_type = other DNA
ctgggccaccttgtggaaga

SEQ ID NO: 14294 - DNA, 20 bp, synthetic construct
  misc_feature 1..20: note = Description of Artificial Sequence: Synthetic oligonucleotide
  misc_feature 1..20: note = Target: ANGPTL4; (-) strand; PAM type: YTN; PAM sequence: CTG
  source 1..20: mol_type = other DNA
ctgctgggccaccttgtgga

SEQ ID NO: 14295 - DNA, 20 bp, synthetic construct
  misc_feature 1..20: note = Description of Artificial Sequence: Synthetic oligonucleotide
  misc_feature 1..20: note = Target: ANGPTL4; (-) strand; PAM type: YTN; PAM sequence: CTC
  source 1..20: mol_type = other DNA
caggtgccgctgctgctggg

SEQ ID NO: 14296 - DNA, 20 bp, synthetic construct
  misc_feature 1..20: note = Description of Artificial Sequence: Synthetic oligonucleotide
  misc_feature 1..20: note = Target: ANGPTL4; (-) strand; PAM type: YTN; PAM sequence: TTC
  source 1..20: mol_type = other DNA
tccaggtgccgctgctgctg

SEQ ID NO: 14297 - DNA, 20 bp, synthetic construct
  misc_feature 1..20: note = Description of Artificial Sequence: Synthetic oligonucleotide
  misc_feature 1..20: note = Target: ANGPTL4; (-) strand; PAM type: YTN; PAM sequence: CTT
  source 1..20: mol_type = other DNA
ctccaggtgccgctgctgct

SEQ ID NO: 14298 - DNA, 20 bp, synthetic construct
  misc_feature 1..20: note = Description of Artificial Sequence: Synthetic oligonucleotide
  misc_feature 1..20: note = Target: ANGPTL4; (-) strand; PAM type: YTN; PAM sequence: CTG
  source 1..20: mol_type = other DNA
cttctccaggtgccgctgct

SEQ ID NO: 14299 - DNA, 20 bp, synthetic construct
  misc_feature 1..20: note = Description of Artificial Sequence: Synthetic oligonucleotide
  misc_feature 1..20: note = Target: ANGPTL4; (-) strand; PAM type: YTN; PAM sequence: TTC
  source 1..20: mol_type = other DNA
gcaggtgctgcttctccagg

SEQ ID NO: 14300 - DNA, 20 bp, synthetic construct
  misc_feature 1..20: note = Description of Artificial Sequence: Synthetic oligonucleotide
  misc_feature 1..20: note = Target: ANGPTL4; (-) strand; PAM type: YTN; PAM sequence: CTG
  source 1..20: mol_type = other DNA
aattcgcaggtgctgcttct

SEQ ID NO: 14301 - DNA, 20 bp, synthetic construct
  misc_feature 1..20: note = Description of Artificial Sequence: Synthetic oligonucleotide
  misc_feature 1..20: note = Target: ANGPTL4; (-) strand; PAM type: YTN; PAM sequence: TTG
  source 1..20: mol_type = other DNA
cagatgctgaattcgcaggt

SEQ ID NO: 14302 - DNA, 20 bp, synthetic construct
  misc_feature 1..20: note = Description of Artificial Sequence: Synthetic oligonucleotide
  misc_feature 1..20: note = Target: ANGPTL4; (-) strand; PAM type: YTN; PAM sequence: TTT
  source 1..20: mol_type = other DNA
gcagatgctgaattcgcagg

SEQ ID NO: 14303 - DNA, 20 bp, synthetic construct
  misc_feature 1..20: note = Description of Artificial Sequence: Synthetic oligonucleotide
  misc_feature 1..20: note = Target: ANGPTL4; (-) strand; PAM type: YTN; PAM sequence: CTT
  source 1..20: mol_type = other DNA
tgcagatgctgaattcgcag

SEQ ID NO: 14304 - DNA, 20 bp, synthetic construct
  misc_feature 1..20: note = Description of Artificial Sequence: Synthetic oligonucleotide
  misc_feature 1..20: note = Target: ANGPTL4; (-) strand; PAM type: YTN; PAM sequence: CTG
  source 1..20: mol_type = other DNA
gctttgcagatgctgaattc

SEQ ID NO: 14305 - DNA, 20 bp, synthetic construct
  misc_feature 1..20: note = Description of Artificial Sequence: Synthetic oligonucleotide
  misc_feature 1..20: note = Target: ANGPTL4; (-) strand; PAM type: YTN; PAM sequence: TTA
  source 1..20: mol_type = other DNA
cctggctttgcagatgctga

SEQ ID NO: 14306 - DNA, 20 bp, synthetic construct
  misc_feature 1..20: note = Description of Artificial Sequence: Synthetic oligonucleotide
  misc_feature 1..20: note = Target: ANGPTL4; (-) strand; PAM type: YTN; PAM sequence: CTA
  source 1..20: mol_type = other DNA
gggttacctggctttgcaga

SEQ ID NO: 14307 - DNA, 20 bp, synthetic construct
  misc_feature 1..20: note = Description of Artificial Sequence: Synthetic oligonucleotide
  misc_feature 1..20: note = Target: ANGPTL4; (-) strand; PAM type: YTN; PAM sequence: TTG
  source 1..20: mol_type = other DNA
atcctagggttacctggctt

SEQ ID NO: 14308 - DNA, 20 bp, synthetic construct
  misc_feature 1..20: note = Description of Artificial Sequence: Synthetic oligonucleotide
  misc_feature 1..20: note = Target: ANGPTL4; (-) strand; PAM type: YTN; PAM sequence: CTT
  source 1..20: mol_type = other DNA
gatcctagggttacctggct

SEQ ID NO: 14309 - DNA, 20 bp, synthetic construct
  misc_feature 1..20: note = Description of Artificial Sequence: Synthetic oligonucleotide
  misc_feature 1..20: note = Target: ANGPTL4; (-) strand; PAM type: YTN; PAM sequence: CTC
  source 1..20: mol_type = other DNA
ccttgatcctagggttacct

SEQ ID NO: 14310 - DNA, 20 bp, synthetic construct
  misc_feature 1..20: note = Description of Artificial Sequence: Synthetic oligonucleotide
  misc_feature 1..20: note = Target: ANGPTL4; (-) strand; PAM type: YTN; PAM sequence: TTC
  source 1..20: mol_type = other DNA
tcccttgatcctagggttac

SEQ ID NO: 14311 - DNA, 20 bp, synthetic construct
  misc_feature 1..20: note = Description of Artificial Sequence: Synthetic oligonucleotide
  misc_feature 1..20: note = Target: ANGPTL4; (-) strand; PAM type: YTN; PAM sequence: TTT
  source 1..20: mol_type = other DNA
ctcccttgatcctagggtta

SEQ ID NO: 14312 - DNA, 20 bp, synthetic construct
  misc_feature 1..20: note = Description of Artificial Sequence: Synthetic oligonucleotide
  misc_feature 1..20: note = Target: ANGPTL4; (-) strand; PAM type: YTN; PAM sequence: TTT
  source 1..20: mol_type = other DNA
tctcccttgatcctagggtt

SEQ ID NO: 14313 - DNA, 20 bp, synthetic construct
  misc_feature 1..20: note = Description of Artificial Sequence: Synthetic oligonucleotide
  misc_feature 1..20: note = Target: ANGPTL4; (-) strand; PAM type: YTN; PAM sequence: CTT
  source 1..20: mol_type = other DNA
ttctcccttgatcctagggt

SEQ ID NO: 14314 - DNA, 20 bp, synthetic construct
  misc_feature 1..20: note = Description of Artificial Sequence: Synthetic oligonucleotide
  misc_feature 1..20: note = Target: ANGPTL4; (-) strand; PAM type: YTN; PAM sequence: CTA
  source 1..20: mol_type = other DNA
tcagagggaccttttctccc

SEQ ID NO: 14315 - DNA, 20 bp, synthetic construct
  misc_feature 1..20: note = Description of Artificial Sequence: Synthetic oligonucleotide
  misc_feature 1..20: note = Target: ANGPTL4; (-) strand; PAM type: YTN; PAM sequence: CTG
  source 1..20: mol_type = other DNA
gggtccagctatcagaggga

SEQ ID NO: 14316 - DNA, 20 bp, synthetic construct
  misc_feature 1..20: note = Description of Artificial Sequence: Synthetic oligonucleotide
  misc_feature 1..20: note = Target: ANGPTL4; (-) strand; PAM type: YTN; PAM sequence: CTC
  source 1..20: mol_type = other DNA
aacctggggtccagctatca

SEQ ID NO: 14317 - DNA, 20 bp, synthetic construct
  misc_feature 1..20: note = Description of Artificial Sequence: Synthetic oligonucleotide
  misc_feature 1..20: note = Target: ANGPTL4; (-) strand; PAM type: YTN; PAM sequence: CTC
  source 1..20: mol_type = other DNA
tcaacctggggtccagctat

SEQ ID NO: 14318 - DNA, 20 bp, synthetic construct
  misc_feature 1..20: note = Description of Artificial Sequence: Synthetic oligonucleotide
  misc_feature 1..20: note = Target: ANGPTL4; (-) strand; PAM type: YTN; PAM sequence: CTC
  source 1..20: mol_type = other DNA
cctctcaacctggggtccag

SEQ ID NO: 14319 - DNA, 20 bp, synthetic construct
  misc_feature 1..20: note = Description of Artificial Sequence: Synthetic oligonucleotide
  misc_feature 1..20: note = Target: ANGPTL4; (-) strand; PAM type: YTN; PAM sequence: CTC
  source 1..20: mol_type = other DNA
accacctccctctcaacctg

SEQ ID NO: 14320 - DNA, 20 bp, synthetic construct
  misc_feature 1..20: note = Description of Artificial Sequence: Synthetic oligonucleotide
  misc_feature 1..20: note = Target: ANGPTL4; (-) strand; PAM type: YTN; PAM sequence: TTC
  source 1..20: mol_type = other DNA
tcaccacctccctctcaacc

SEQ ID NO: 14321 - DNA, 20 bp, synthetic construct
  misc_feature 1..20: note = Description of Artificial Sequence: Synthetic oligonucleotide
  misc_feature 1..20: note = Target: ANGPTL4; (-) strand; PAM type: YTN; PAM sequence: CTG
  source 1..20: mol_type = other DNA
gccccacgtccccagccaca

SEQ ID NO: 14322 - DNA, 20 bp, synthetic construct
  misc_feature 1..20: note = Description of Artificial Sequence: Synthetic oligonucleotide
  misc_feature 1..20: note = Target: ANGPTL4; (-) strand; PAM type: YTN; PAM sequence: CTG
  source 1..20: mol_type = other DNA
cctggccccacgtccccagc

SEQ ID NO: 14323 - DNA, 20 bp, synthetic construct
  misc_feature 1..20: note = Description of Artificial Sequence: Synthetic oligonucleotide
  misc_feature 1..20: note = Target: ANGPTL4; (-) strand; PAM type: YTN; PAM sequence: CTA
  source 1..20: mol_type = other DNA
ggatgggacgggaggagggt

SEQ ID NO: 14324 - DNA, 20 bp, synthetic construct
  misc_feature 1..20: note = Description of Artificial Sequence: Synthetic oligonucleotide
  misc_feature 1..20: note = Target: ANGPTL4; (-) strand; PAM type: YTN; PAM sequence: TTG
  source 1..20: mol_type = other DNA
tggtccaggaggccaaacta

SEQ ID NO: 14325 - DNA, 20 bp, synthetic construct
  misc_feature 1..20: note = Description of Artificial Sequence: Synthetic oligonucleotide
  misc_feature 1..20: note = Target: ANGPTL4; (-) strand; PAM type: YTN; PAM sequence: CTT
  source 1..20: mol_type = other DNA
gtggtccaggaggccaaact

SEQ ID NO: 14326 - DNA, 20 bp, synthetic construct
  misc_feature 1..20: note = Description of Artificial Sequence: Synthetic oligonucleotide
  misc_feature 1..20: note = Target: ANGPTL4; (-) strand; PAM type: YTN; PAM sequence: CTA
  source 1..20: mol_type = other DNA
ggtgcttgtggtccaggagg

SEQ ID NO: 14327 - DNA, 20 bp, synthetic construct
  misc_feature 1..20: note = Description of Artificial Sequence: Synthetic oligonucleotide
  misc_feature 1..20: note = Target: ANGPTL4; (-) strand; PAM type: YTN; PAM sequence: CTC
  source 1..20: mol_type = other DNA
atggtctaggtgcttgtggt

SEQ ID NO: 14328 - DNA, 20 bp, synthetic construct
  misc_feature 1..20: note = Description of Artificial Sequence: Synthetic oligonucleotide
  misc_feature 1..20: note = Target: ANGPTL4; (-) strand; PAM type: YTN; PAM sequence: TTG
  source 1..20: mol_type = other DNA
gccacctcatggtctaggtg

SEQ ID NO: 14329 - DNA, 20 bp, synthetic construct
  misc_feature 1..20: note = Description of Artificial Sequence: Synthetic oligonucleotide
  misc_feature 1..20: note = Target: ANGPTL4; (-) strand; PAM type: YTN; PAM sequence: CTT
  source 1..20: mol_type = other DNA
ggccacctcatggtctaggt

SEQ ID NO: 14330 - DNA, 20 bp, synthetic construct
  misc_feature 1..20: note = Description of Artificial Sequence: Synthetic oligonucleotide
  misc_feature 1..20: note = Target: ANGPTL4; (-) strand; PAM type: YTN; PAM sequence: TTC
  source 1..20: mol_type = other DNA
gggcaggcttggccacctca

SEQ ID NO: 14331 - DNA, 20 bp, synthetic construct
  misc_feature 1..20: note = Description of Artificial Sequence: Synthetic oligonucleotide
  misc_feature 1..20: note = Target: ANGPTL4; (-) strand; PAM type: YTN; PAM sequence: CTT
  source 1..20: mol_type = other DNA
cgggcaggcttggccacctc

SEQ ID NO: 14332 - DNA, 20 bp, synthetic construct
  misc_feature 1..20: note = Description of Artificial Sequence: Synthetic oligonucleotide
  misc_feature 1..20: note = Target: ANGPTL4; (-) strand; PAM type: YTN; PAM sequence: TTC
  source 1..20: mol_type = other DNA
ttcgggcaggcttggccacc

SEQ ID NO: 14333 - DNA, 20 bp, synthetic construct
  misc_feature 1..20: note = Description of Artificial Sequence: Synthetic oligonucleotide
  misc_feature 1..20: note = Target: ANGPTL4; (-) strand; PAM type: YTN; PAM sequence: TTT
  source 1..20: mol_type = other DNA
cttcgggcaggcttggccac

SEQ ID NO: 14334 - DNA, 20 bp, synthetic construct
  misc_feature 1..20: note = Description of Artificial Sequence: Synthetic oligonucleotide
  misc_feature 1..20: note = Target: ANGPTL4; (-) strand; PAM type: YTN; PAM sequence: CTT
  source 1..20: mol_type = other DNA
tcttcgggcaggcttggcca

SEQ ID NO: 14335 - DNA, 20 bp, synthetic construct
  misc_feature 1..20: note = Description of Artificial Sequence: Synthetic oligonucleotide
  misc_feature 1..20: note = Target: ANGPTL4; (-) strand; PAM type: YTN; PAM sequence: CTC
  source 1..20: mol_type = other DNA
tttcttcgggcaggcttggc

SEQ ID NO: 14336 - DNA, 20 bp, synthetic construct
  misc_feature 1..20: note = Description of Artificial Sequence: Synthetic oligonucleotide
  misc_feature 1..20: note = Target: ANGPTL4; (-) strand; PAM type: YTN; PAM sequence: CTC
  source 1..20: mol_type = other DNA
gggcagcctctttcttcggg

SEQ ID NO: 14337 - DNA, 20 bp, synthetic construct
  misc_feature 1..20: note = Description of Artificial Sequence: Synthetic oligonucleotide
  misc_feature 1..20: note = Target: ANGPTL4; (-) strand; PAM type: YTN; PAM sequence: CTG
  source 1..20: mol_type = other DNA
ggccatctcgggcagcctct

SEQ ID NO: 14338 - DNA, 20 bp, synthetic construct
  misc_feature 1..20: note = Description of Artificial Sequence: Synthetic oligonucleotide
  misc_feature 1..20: note = Target: ANGPTL4; (-) strand; PAM type: YTN; PAM sequence: CTG
  source 1..20: mol_type = other DNA
gctgggccatctcgggcagc

SEQ ID NO: 14339 - DNA, 20 bp, synthetic construct
  misc_feature 1..20: note = Description of Artificial Sequence: Synthetic oligonucleotide
  misc_feature 1..20: note = Target: ANGPTL4; (-) strand; PAM type: YTN; PAM sequence: TTG
  source 1..20: mol_type = other DNA
tgagccgggtcaactggctg

SEQ ID NO: 14340 - DNA, 20 bp, synthetic construct
  misc_feature 1..20: note = Description of Artificial Sequence: Synthetic oligonucleotide
  misc_feature 1..20: note = Target: ANGPTL4; (-) strand; PAM type: YTN; PAM sequence: CTG
  source 1..20: mol_type = other DNA
acattgtgagccgggtcaac

SEQ ID NO: 14341 - DNA, 20 bp, synthetic construct
  misc_feature 1..20: note = Description of Artificial Sequence: Synthetic oligonucleotide
  misc_feature 1..20: note = Target: ANGPTL4; (-) strand; PAM type: YTN; PAM sequence: CTC
  source 1..20: mol_type = other DNA
acggtgcaggcggctgacat

SEQ ID NO: 14342 - DNA, 20 bp, synthetic construct
  misc_feature 1..20: note = Description of Artificial Sequence: Synthetic oligonucleotide
  misc_feature 1..20: note = Target: ANGPTL4; (-) strand; PAM type: YTN; PAM sequence: CTG
  source 1..20: mol_type = other DNA
acaaggagaggaccagcaat

SEQ ID NO: 14343 - DNA, 20 bp, synthetic construct
  misc_feature 1..20: note = Description of Artificial Sequence: Synthetic oligonucleotide
  misc_feature 1..20: note = Target: ANGPTL4; (-) strand; PAM type: YTN; PAM sequence: TTA
  source 1..20: mol_type = other DNA
aggtggacctgacaaggaga

SEQ ID NO: 14344 - DNA, 20 bp, synthetic construct
  misc_feature 1..20: note = Description of Artificial Sequence: Synthetic oligonucleotide
  misc_feature 1..20: note = Target: ANGPTL4; (-) strand; PAM type: YTN; PAM sequence: CTT
  source 1..20: mol_type = other DNA
aaggtggacctgacaaggag

SEQ ID NO: 14345 - DNA, 20 bp, synthetic construct
  misc_feature 1..20: note = Description of Artificial Sequence: Synthetic oligonucleotide
  misc_feature 1..20: note = Target: ANGPTL4; (-) strand; PAM type: YTN; PAM sequence: CTC
  source 1..20: mol_type = other DNA
cttaaggtggacctgacaag

SEQ ID NO: 14346 - DNA, 20 bp, synthetic construct
  misc_feature 1..20: note = Description of Artificial Sequence: Synthetic oligonucleotide
  misc_feature 1..20: note = Target: ANGPTL4; (-) strand; PAM type: YTN; PAM sequence: TTC
  source 1..20: mol_type = other DNA
tccttaaggtggacctgaca

SEQ ID NO: 14347 - DNA, 20 bp, synthetic construct
  misc_feature 1..20: note = Description of Artificial Sequence: Synthetic oligonucleotide
  misc_feature 1..20: note = Target: ANGPTL4; (-) strand; PAM type: YTN; PAM sequence: CTT
  source 1..20: mol_type = other DNA
ctccttaaggtggacctgac

SEQ ID NO: 14348 - DNA, 20 bp, synthetic construct
  misc_feature 1..20: note = Description of Artificial Sequence: Synthetic oligonucleotide
  misc_feature 1..20: note = Target: ANGPTL4; (-) strand; PAM type: YTN; PAM sequence: CTC
  source 1..20: mol_type = other DNA
caggccaggacatcttctcc

SEQ ID NO: 14349 - DNA, 20 bp, synthetic construct
  misc_feature 1..20: note = Description of Artificial Sequence: Synthetic oligonucleotide
  misc_feature 1..20: note = Target: ANGPTL4; (-) strand; PAM type: YTN; PAM sequence: CTC
  source 1..20: mol_type = other DNA
agggactccaggccaggaca

SEQ ID NO: 14350 - DNA, 20 bp, synthetic construct
  misc_feature 1..20: note = Description of Artificial Sequence: Synthetic oligonucleotide
  misc_feature 1..20: note = Target: ANGPTL4; (-) strand; PAM type: YTN; PAM sequence: CTG
  source 1..20: mol_type = other DNA
gtgagccctcagggactcca

SEQ ID NO: 14351 - DNA, 20 bp, synthetic construct
  misc_feature 1..20: note = Description of Artificial Sequence: Synthetic oligonucleotide
  misc_feature 1..20: note = Target: ANGPTL4; (-) strand; PAM type: YTN; PAM sequence: TTG
  source 1..20: mol_type = other DNA
acccagagactggtgagccc

SEQ ID NO: 14352 - DNA, 20 bp, synthetic construct
  misc_feature 1..20: note = Description of Artificial Sequence: Synthetic oligonucleotide
  misc_feature 1..20: note = Target: ANGPTL4; (-) strand; PAM type: YTN; PAM sequence: TTT
  source 1..20: mol_type = other DNA
gacccagagactggtgagcc

SEQ ID NO: 14353 - DNA, 20 bp, synthetic construct
  misc_feature 1..20: note = Description of Artificial Sequence: Synthetic oligonucleotide
  misc_feature 1..20: note = Target: ANGPTL4; (-) strand; PAM type: YTN; PAM sequence: CTT
  source 1..20: mol_type = other DNA
tgacccagagactggtgagc

SEQ ID NO: 14354 - DNA, 20 bp, synthetic construct
  misc_feature 1..20: note = Description of Artificial Sequence: Synthetic oligonucleotide
  misc_feature 1..20: note = Target: ANGPTL4; (-) strand; PAM type: YTN; PAM sequence: CTC
  source 1..20: mol_type = other DNA
ccatcagctttgacccagag

SEQ ID NO: 14355 - DNA, 20 bp, synthetic construct
  misc_feature 1..20: note = Description of Artificial Sequence: Synthetic oligonucleotide
  misc_feature 1..20: note = Target: ANGPTL4; (-) strand; PAM type: YTN; PAM sequence: CTG
  source 1..20: mol_type = other DNA
aggaaggaggtgctcccatc

SEQ ID NO: 14356 - DNA, 20 bp, synthetic construct
  misc_feature 1..20: note = Description of Artificial Sequence: Synthetic oligonucleotide
  misc_feature 1..20: note = Target: ANGPTL4; (-) strand; PAM type: YTN; PAM sequence: CTG
  source 1..20: mol_type = other DNA
ggccaggtcagggctgagga

SEQ ID NO: 14357 - DNA, 20 bp, synthetic construct
  misc_feature 1..20: note = Description of Artificial Sequence: Synthetic oligonucleotide
  misc_feature 1..20: note = Target: ANGPTL4; (-) strand; PAM type: YTN; PAM sequence: CTG
  source 1..20: mol_type = other DNA
gctgggccaggtcagggctg

SEQ ID NO: 14358 - DNA, 20 bp, synthetic construct
  misc_feature 1..20: note = Description of Artificial Sequence: Synthetic oligonucleotide
  misc_feature 1..20: note = Target: ANGPTL4; (-) strand; PAM type: YTN; PAM sequence: TTG
  source 1..20: mol_type = other DNA
ggtggcctggctgggccagg

SEQ ID NO: 14359 - DNA, 20 bp, synthetic construct
  misc_feature 1..20: note = Description of Artificial Sequence: Synthetic oligonucleotide
  misc_feature 1..20: note = Target: ANGPTL4; (-) strand; PAM type: YTN; PAM sequence: TTG
  source 1..20: mol_type = other DNA
cagaggagaagggttgggtg

SEQ ID NO: 14360 - DNA, 20 bp, synthetic construct
  misc_feature 1..20: note = Description of Artificial Sequence: Synthetic oligonucleotide
  misc_feature 1..20: note = Target: ANGPTL4; (-) strand; PAM type: YTN; PAM sequence: CTT
  source 1..20: mol_type = other DNA
gcagaggagaagggttgggt

SEQ ID NO: 14361 - DNA, 20 bp, synthetic construct
  misc_feature 1..20: note = Description of Artificial Sequence: Synthetic oligonucleotide
  misc_feature 1..20: note = Target: ANGPTL4; (-) strand; PAM type: YTN; PAM sequence: CTG
  source 1..20: mol_type = other DNA
gcttgcagaggagaagggtt

SEQ ID NO: 14362 - DNA, 20 bp, synthetic construct
  misc_feature 1..20: note = Description of Artificial Sequence: Synthetic oligonucleotide
  misc_feature 1..20: note = Target: ANGPTL4; (-) strand; PAM type: YTN; PAM sequence: TTC
  source 1..20: mol_type = other DNA
agggacagcccactggcttg

SEQ ID NO: 14363 - DNA, 20 bp, synthetic construct
  misc_feature 1..20: note = Description of Artificial Sequence: Synthetic oligonucleotide
  misc_feature 1..20: note = Target: ANGPTL4; (-) strand; PAM type: YTN; PAM sequence: CTT
  source 1..20: mol_type = other DNA
cagggacagcccactggctt

SEQ ID NO: 14364 - DNA, 20 bp, synthetic construct
  misc_feature 1..20: note = Description of Artificial Sequence: Synthetic oligonucleotide
  misc_feature 1..20: note = Target: ANGPTL4; (-) strand; PAM type: YTN; PAM sequence: TTC
  source 1..20: mol_type = other DNA
caatcagtgatcagcagggc

SEQ ID NO: 14365 - DNA, 20 bp, synthetic construct
  misc_feature 1..20: note = Description of Artificial Sequence: Synthetic oligonucleotide
  misc_feature 1..20: note = Target: ANGPTL4; (-) strand; PAM type: YTN; PAM sequence: CTG
  source 1..20: mol_type = other DNA
ttccaatcagtgatcagcag

SEQ ID NO: 14366 - DNA, 20 bp, synthetic construct
  misc_feature 1..20: note = Description of Artificial Sequence: Synthetic oligonucleotide
  misc_feature 1..20: note = Target: ANGPTL4; (-) strand; PAM type: YTN; PAM sequence: CTC
  source 1..20: mol_type = other DNA
tgttccaatcagtgatcagc

SEQ ID NO: 14367 - DNA, 20 bp, synthetic construct
  misc_feature 1..20: note = Description of Artificial Sequence: Synthetic oligonucleotide
  misc_feature 1..20: note = Target: ANGPTL4; (-) strand; PAM type: YTN; PAM sequence: CTC
  source 1..20: mol_type = other DNA
cacctctgttccaatcagtg

SEQ ID NO: 14368 - DNA, 20 bp, synthetic construct
  misc_feature 1..20: note = Description of Artificial Sequence: Synthetic oligonucleotide
  misc_feature 1..20: note = Target: ANGPTL4; (-) strand; PAM type: YTN; PAM sequence: TTC
  source 1..20: mol_type = other DNA
tccacctctgttccaatcag

SEQ ID NO: 14369 - DNA, 20 bp, synthetic construct
  misc_feature 1..20: note = Description of Artificial Sequence: Synthetic oligonucleotide
  misc_feature 1..20: note = Target: ANGPTL4; (-) strand; PAM type: YTN; PAM sequence: TTT
  source 1..20: mol_type = other DNA
ctccacctctgttccaatca

SEQ ID NO: 14370 - DNA, 20 bp, synthetic construct
  misc_feature 1..20: note = Description of Artificial Sequence: Synthetic oligonucleotide
  misc_feature 1..20: note = Target: ANGPTL4; (-) strand; PAM type: YTN; PAM sequence: CTT
  source 1..20: mol_type = other DNA
tctccacctctgttccaatc

SEQ ID NO: 14371 - DNA, 20 bp, synthetic construct
  misc_feature 1..20: note = Description of Artificial Sequence: Synthetic oligonucleotide
  misc_feature 1..20: note = Target: ANGPTL4; (-) strand; PAM type: YTN; PAM sequence: CTC
  source 1..20: mol_type = other DNA
tttctccacctctgttccaa

SEQ ID NO: 14372 - DNA, 20 bp, synthetic construct
  misc_feature 1..20: note = Description of Artificial Sequence: Synthetic oligonucleotide
  misc_feature 1..20: note = Target: ANGPTL4; (-) strand; PAM type: YTN; PAM sequence: CTC
  source 1..20: mol_type = other DNA
aagacctctttctccacctc

SEQ ID NO: 14373 - DNA, 20 bp, synthetic construct
  misc_feature 1..20: note = Description of Artificial Sequence: Synthetic oligonucleotide
  misc_feature 1..20: note = Target: ANGPTL4; (-) strand; PAM type: YTN; PAM sequence: CTC
  source 1..20: mol_type = other DNA
aagtccctcaagacctcttt

SEQ ID NO: 14374 - DNA, 20 bp, synthetic construct
  misc_feature 1..20: note = Description of Artificial Sequence: Synthetic oligonucleotide
  misc_feature 1..20: note = Target: ANGPTL4; (-) strand; PAM type: YTN; PAM sequence: CTG
  source 1..20: mol_type = other DNA
cagctcaagtccctcaagac

SEQ ID NO: 14375 - DNA, 20 bp, synthetic construct
  misc_feature 1..20: note = Description of Artificial Sequence: Synthetic oligonucleotide
  misc_feature 1..20: note = Target: ANGPTL4; (-) strand; PAM type: YTN; PAM sequence: CTC
  source 1..20: mol_type = other DNA
cagcacccctgcagctcaag

SEQ ID NO: 14376 - DNA, 20 bp, synthetic construct
  misc_feature 1..20: note = Description of Artificial Sequence: Synthetic oligonucleotide
  misc_feature 1..20: note = Target: ANGPTL4; (-) strand; PAM type: YTN; PAM sequence: TTC
  source 1..20: mol_type = other DNA
tccagcacccctgcagctca

SEQ ID NO: 14377 - DNA, 20 bp, synthetic construct
  misc_feature 1..20: note = Description of Artificial Sequence: Synthetic oligonucleotide
  misc_feature 1..20: note = Target: ANGPTL4; (-) strand; PAM type: YTN; PAM sequence: CTT
  source 1..20: mol_type = other DNA
ctccagcacccctgcagctc

SEQ ID NO: 14378 - DNA, 20 bp, synthetic construct
  misc_feature 1..20: note = Description of Artificial Sequence: Synthetic oligonucleotide
  misc_feature 1..20: note = Target: ANGPTL4; (-) strand; PAM type: YTN; PAM sequence: CTA
  source 1..20: mol_type = other DNA
ccttctccagcacccctgca

SEQ ID NO: 14379 - DNA, 20 bp, synthetic construct
  misc_feature 1..20: note = Description of Artificial Sequence: Synthetic oligonucleotide
  misc_feature 1..20: note = Target: ANGPTL4; (-) strand; PAM type: YTN; PAM sequence: TTC
  source 1..20: mol_type = other DNA
taccttctccagcacccctg

SEQ ID NO: 14380 - DNA, 20 bp, synthetic construct
  misc_feature 1..20: note = Description of Artificial Sequence: Synthetic oligonucleotide
  misc_feature 1..20: note = Target: ANGPTL4; (-) strand; PAM type: YTN; PAM sequence: TTT
  source 1..20: mol_type = other DNA
ctaccttctccagcacccct

SEQ ID NO: 14381 - DNA, 20 bp, synthetic construct
  misc_feature 1..20: note = Description of Artificial Sequence: Synthetic oligonucleotide
  misc_feature 1..20: note = Target: ANGPTL4; (-) strand; PAM type: YTN; PAM sequence: TTC
  source 1..20: mol_type = other DNA
aggatggcaccccgaacccc

SEQ ID NO: 14382 - DNA, 20 bp, synthetic construct
  misc_feature 1..20: note = Description of Artificial Sequence: Synthetic oligonucleotide
  misc_feature 1..20: note = Target: ANGPTL4; (-) strand; PAM type: YTN; PAM sequence: CTT
  source 1..20: mol_type = other DNA
caggatggcaccccgaaccc

SEQ ID NO: 14383 - DNA, 20 bp, synthetic construct
  misc_feature 1..20: note = Description of Artificial Sequence: Synthetic oligonucleotide
  misc_feature 1..20: note = Target: ANGPTL4; (-) strand; PAM type: YTN; PAM sequence: CTA
  source 1..20: mol_type = other DNA
accttcaggatggcaccccg

SEQ ID NO: 14384 - DNA, 20 bp, synthetic construct
  misc_feature 1..20: note = Description of Artificial Sequence: Synthetic oligonucleotide
  misc_feature 1..20: note = Target: ANGPTL4; (-) strand; PAM type: YTN; PAM sequence: TTC
  source 1..20: mol_type = other DNA
taaccttcaggatggcaccc

SEQ ID NO: 14385 - DNA, 20 bp, synthetic construct
  misc_feature 1..20: note = Description of Artificial Sequence: Synthetic oligonucleotide
  misc_feature 1..20: note = Target: ANGPTL4; (-) strand; PAM type: YTN; PAM sequence: CTA
  source 1..20: mol_type = other DNA
gaaggttctaaccttcagga

SEQ ID NO: 14386 - DNA, 20 bp, synthetic construct
  misc_feature 1..20: note = Description of Artificial Sequence: Synthetic oligonucleotide
  misc_feature 1..20: note = Target: ANGPTL4; (-) strand; PAM type: YTN; PAM sequence: CTC
  source 1..20: mol_type = other DNA
ccctagaaggttctaacctt

SEQ ID NO: 14387 - DNA, 20 bp, synthetic construct
  misc_feature 1..20: note = Description of Artificial Sequence: Synthetic oligonucleotide
  misc_feature 1..20: note = Target: ANGPTL4; (-) strand; PAM type: YTN; PAM sequence: CTC
  source 1..20: mol_type = other DNA
catgacaccctcccctagaa

SEQ ID NO: 14388 - DNA, 20 bp, synthetic construct
  misc_feature 1..20: note = Description of Artificial Sequence: Synthetic oligonucleotide
  misc_feature 1..20: note = Target: ANGPTL4; (-) strand; PAM type: YTN; PAM sequence: CTC
  source 1..20: mol_type = other DNA
ctccatgacaccctccccta

SEQ ID NO: 14389 - DNA, 20 bp, synthetic construct
  misc_feature 1..20: note = Description of Artificial Sequence: Synthetic oligonucleotide
  misc_feature 1..20: note = Target: ANGPTL4; (-) strand; PAM type: YTN; PAM sequence: CTG
  source 1..20: mol_type = other DNA
gcaccccctcctccatgaca

SEQ ID NO: 14390 - DNA, 20 bp, synthetic construct
  misc_feature 1..20: note = Description of Artificial Sequence: Synthetic oligonucleotide
  misc_feature 1..20: note = Target: ANGPTL4; (-) strand; PAM type: YTN; PAM sequence: CTA
  source 1..20: mol_type = other DNA
cctggcaccccctcctccat

SEQ ID NO: 14391 - DNA, 20 bp, synthetic construct
  misc_feature 1..20: note = Description of Artificial Sequence: Synthetic oligonucleotide
  misc_feature 1..20: note = Target: ANGPTL4; (-) strand; PAM type: YTN; PAM sequence: CTA
  source 1..20: mol_type = other DNA
ctacctggcaccccctcctc

SEQ ID NO: 14392 - DNA, 20 bp, synthetic construct
  misc_feature 1..20: note = Description of Artificial Sequence: Synthetic oligonucleotide
  misc_feature 1..20: note = Target: ANGPTL4; (-) strand; PAM type: YTN; PAM sequence: CTA
  source 1..20: mol_type = other DNA
caaacactactacctggcac

SEQ ID NO: 14393 - DNA, 20 bp, synthetic construct
  misc_feature 1..20: note = Description of Artificial Sequence: Synthetic oligonucleotide
  misc_feature 1..20: note = Target: ANGPTL4; (-) strand; PAM type: YTN; PAM sequence: TTG
  source 1..20: mol_type = other DNA
tggagggcccaaatctacaa

SEQ ID NO: 14394 - DNA, 20 bp, synthetic construct
  misc_feature 1..20: note = Description of Artificial Sequence: Synthetic oligonucleotide
  misc_feature 1..20: note = Target: ANGPTL4; (-) strand; PAM type: YTN; PAM sequence: TTC
  source 1..20: mol_type = other DNA
ccacataccccaagacattg

SEQ ID NO: 14395 - DNA, 20 bp, synthetic construct
  misc_feature 1..20: note = Description of Artificial Sequence: Synthetic oligonucleotide
  misc_feature 1..20: note = Target: ANGPTL4; (-) strand; PAM type: YTN; PAM sequence: CTA
  source 1..20: mol_type = other DNA
attcccacataccccaagac

SEQ ID NO: 14396 - DNA, 20 bp, synthetic construct
  misc_feature 1..20: note = Description of Artificial Sequence: Synthetic oligonucleotide
  misc_feature 1..20: note = Target: ANGPTL4; (-) strand; PAM type: YTN; PAM sequence: TTC
  source 1..20: mol_type = other DNA
ccagccctaattcccacata

SEQ ID NO: 14397 - DNA, 20 bp, synthetic construct
  misc_feature 1..20: note = Description of Artificial Sequence: Synthetic oligonucleotide
  misc_feature 1..20: note = Target: ANGPTL4; (-) strand; PAM type: YTN; PAM sequence: CTG
  source 1..20: mol_type = other DNA
ggggttcccagccctaattc

SEQ ID NO: 14398 - DNA, 20 bp, synthetic construct
  misc_feature 1..20: note = Description of Artificial Sequence: Synthetic oligonucleotide
  misc_feature 1..20: note = Target: ANGPTL4; (-) strand; PAM type: YTN; PAM sequence: CTG
  source 1..20: mol_type = other DNA
ggagctgggggttcccagcc

SEQ ID NO: 14399 - DNA, 20 bp, synthetic construct
  misc_feature 1..20: note = Description of Artificial Sequence: Synthetic oligonucleotide
  misc_feature 1..20: note = Target: ANGPTL4; (-) strand; PAM type: YTN; PAM sequence: CTG
  source 1..20: mol_type = other DNA
gtctgggagctgggggttcc

SEQ ID NO: 14400 - DNA, 20 bp, synthetic construct
  misc_feature 1..20: note = Description of Artificial Sequence: Synthetic oligonucleotide
  misc_feature 1..20: note = Target: ANGPTL4; (-) strand; PAM type: YTN; PAM sequence: TTC
  source 1..20: mol_type = other DNA
tggtctgggagctgggggtt

SEQ ID NO: 14401 - DNA, 20 bp, synthetic construct
  misc_feature 1..20: note = Description of Artificial Sequence: Synthetic oligonucleotide
  misc_feature 1..20: note = Target: ANGPTL4; (-) strand; PAM type: YTN; PAM sequence: TTT
  source 1..20: mol_type = other DNA
ctggtctgggagctgggggt

SEQ ID NO: 14402 - DNA, 20 bp, synthetic construct
  misc_feature 1..20: note = Description of Artificial Sequence: Synthetic oligonucleotide
  misc_feature 1..20: note = Target: ANGPTL4; (-) strand; PAM type: YTN; PAM sequence: TTG
  source 1..20: mol_type = other DNA
taagatacaagagtgtttct

SEQ ID NO: 14403 - DNA, 20 bp, synthetic construct
  misc_feature 1..20: note = Description of Artificial Sequence: Synthetic oligonucleotide
  misc_feature 1..20: note = Target: ANGPTL4; (-) strand; PAM type: YTN; PAM sequence: TTT
  source 1..20: mol_type = other DNA
gtaagatacaagagtgtttc

SEQ ID NO: 14404 - DNA, 20 bp, synthetic construct
  misc_feature 1..20: note = Description of Artificial Sequence: Synthetic oligonucleotide
  misc_feature 1..20: note = Target: ANGPTL4; (-) strand; PAM type: YTN; PAM sequence: TTG
  source 1..20: mol_type = other DNA
gatttgtaagatacaagagt

SEQ ID NO: 14405 - DNA, 20 bp, synthetic construct
  misc_feature 1..20: note = Description of Artificial Sequence: Synthetic oligonucleotide
  misc_feature 1..20: note = Target: ANGPTL4; (-) strand; PAM type: YTN; PAM sequence: CTG
  source 1..20: mol_type = other DNA
gagcattggatttgtaagat

SEQ ID NO: 14406 - DNA, 20 bp, synthetic construct
  misc_feature 1..20: note = Description of Artificial Sequence: Synthetic oligonucleotide
  misc_feature 1..20: note = Target: ANGPTL4; (-) strand; PAM type: YTN; PAM sequence: CTG
  source 1..20: mol_type = other DNA
cggtggggagggggccggcg

SEQ ID NO: 14407 - DNA, 20 bp, synthetic construct
  misc_feature 1..20: note = Description of Artificial Sequence: Synthetic oligonucleotide
  misc_feature 1..20: note = Target: ANGPTL4; (-) strand; PAM type: YTN; PAM sequence: TTC
  source 1..20: mol_type = other DNA
tgcggtggggagggggccgg

SEQ ID NO: 14408 - DNA, 20 bp, synthetic construct
  misc_feature 1..20: note = Description of Artificial Sequence: Synthetic oligonucleotide
  misc_feature 1..20: note = Target: ANGPTL4; (-) strand; PAM type: YTN; PAM sequence: TTT
  source 1..20: mol_type = other DNA
ctgcggtggggagggggccg

SEQ ID NO: 14409 - DNA, 20 bp, synthetic construct
  misc_feature 1..20: note = Description of Artificial Sequence: Synthetic oligonucleotide
  misc_feature 1..20: note = Target: ANGPTL4; (-) strand; PAM type: YTN; PAM sequence: CTT
  source 1..20: mol_type = other DNA
tctgcggtggggagggggcc

SEQ ID NO: 14410 - DNA, 20 bp, synthetic construct
  misc_feature 1..20: note = Description of Artificial Sequence: Synthetic oligonucleotide
  misc_feature 1..20: note = Target: ANGPTL4; (-) strand; PAM type: YTN; PAM sequence: TTG
  source 1..20: mol_type = other DNA
tggtggcagcaaaagcccac

SEQ ID NO: 14411 - DNA, 20 bp, synthetic construct
  misc_feature 1..20: note = Description of Artificial Sequence: Synthetic oligonucleotide
  misc_feature 1..20: note = Target: ANGPTL4; (-) strand; PAM type: YTN; PAM sequence: CTT
  source 1..20: mol_type = other DNA
gtggtggcagcaaaagccca

SEQ ID NO: 14412 - DNA, 20 bp, synthetic construct
  misc_feature 1..20: note = Description of Artificial Sequence: Synthetic oligonucleotide
  misc_feature 1..20: note = Target: ANGPTL4; (-) strand; PAM type: YTN; PAM sequence: CTA
  source 1..20: mol_type = other DNA
caacttgtggtggcagcaaa

SEQ ID NO: 14413 - DNA, 20 bp, synthetic construct
  misc_feature 1..20: note = Description of Artificial Sequence: Synthetic oligonucleotide
  misc_feature 1..20: note = Target: ANGPTL4; (-) strand; PAM type: YTN; PAM sequence: TTG
  source 1..20: mol_type = other DNA
ggaataaagcacctacaact

SEQ ID NO: 14414 - DNA, 20 bp, synthetic construct
  misc_feature 1..20: note = Description of Artificial Sequence: Synthetic oligonucleotide
  misc_feature 1..20: note = Target: ANGPTL4; (-) strand; PAM type: YTN; PAM sequence: TTT
  source 1..20: mol_type = other DNA
gggaataaagcacctacaac

SEQ ID NO: 14415 - DNA, 20 bp, synthetic construct
  misc_feature 1..20: note = Description of Artificial Sequence: Synthetic oligonucleotide
  misc_feature 1..20: note = Target: ANGPTL4; (-) strand; PAM type: YTN; PAM sequence: TTC
  source 1..20: mol_type = other DNA
gagatgaacggagatttggg

SEQ ID NO: 14416 - DNA, 20 bp, synthetic construct
  misc_feature 1..20: note = Description of Artificial Sequence: Synthetic oligonucleotide
  misc_feature 1..20: note = Target: ANGPTL4; (-) strand; PAM type: YTN; PAM sequence: CTG
  source 1..20: mol_type = other DNA
tggttcgagatgaacggaga

SEQ ID NO: 14417 - DNA, 20 bp, synthetic construct
  misc_feature 1..20: note = Description of Artificial Sequence: Synthetic oligonucleotide
  misc_feature 1..20: note = Target: ANGPTL4; (-) strand; PAM type: YTN; PAM sequence: CTG
  source 1..20: mol_type = other DNA
catcggacacacgtggacat

SEQ ID NO: 14418 - DNA, 20 bp, synthetic construct
  misc_feature 1..20: note = Description of Artificial Sequence: Synthetic oligonucleotide
  misc_feature 1..20: note = Target: ANGPTL4; (-) strand; PAM type: YTN; PAM sequence: TTA
  source 1..20: mol_type = other DNA
gagaaccgcgagtctgcatc

SEQ ID NO: 14419 - DNA, 20 bp, synthetic construct
  misc_feature 1..20: note = Description of Artificial Sequence: Synthetic oligonucleotide
  misc_feature 1..20: note = Target: ANGPTL4; (-) strand; PAM type: YTN; PAM sequence: CTT
  source 1..20: mol_type = other DNA
agagaaccgcgagtctgcat

SEQ ID NO: 14420 - DNA, 20 bp, synthetic construct
  misc_feature 1..20: note = Description of Artificial Sequence: Synthetic oligonucleotide
  misc_feature 1..20: note = Target: ANGPTL4; (-) strand; PAM type: YTN; PAM sequence: CTG
  source 1..20: mol_type = other DNA
tggacagccacagatgcagg

SEQ ID NO: 14421 - DNA, 20 bp, synthetic construct
  misc_feature 1..20: note = Description of Artificial Sequence: Synthetic oligonucleotide
  misc_feature 1..20: note = Target: ANGPTL4; (-) strand; PAM type: YTN; PAM sequence: TTG
  source 1..20: mol_type = other DNA
gctgtggacagccacagatg

SEQ ID NO: 14422 - DNA, 20 bp, synthetic construct
  misc_feature 1..20: note = Description of Artificial Sequence: Synthetic oligonucleotide
  misc_feature 1..20: note = Target: ANGPTL4; (-) strand; PAM type: YTN; PAM sequence: TTC
  source 1..20: mol_type = other DNA
acccagttggctgtggacag

SEQ ID NO: 14423 - DNA, 20 bp, synthetic construct
  misc_feature 1..20: note = Description of Artificial Sequence: Synthetic oligonucleotide
  misc_feature 1..20: note = Target: ANGPTL4; (-) strand; PAM type: YTN; PAM sequence: TTT
  source 1..20: mol_type = other DNA
cacccagttggctgtggaca

SEQ ID NO: 14424 - DNA, 20 bp, synthetic construct
  misc_feature 1..20: note = Description of Artificial Sequence: Synthetic oligonucleotide
  misc_feature 1..20: note = Target: ANGPTL4; (-) strand; PAM type: YTN; PAM sequence: CTT
  source 1..20: mol_type = other DNA
tcacccagttggctgtggac

SEQ ID NO: 14425 - DNA, 20 bp, synthetic construct
  misc_feature 1..20: note = Description of Artificial Sequence: Synthetic oligonucleotide
  misc_feature 1..20: note = Target: ANGPTL4; (-) strand; PAM type: YTN; PAM sequence: CTA
  source 1..20: mol_type = other DNA
gggtgtgagagggggatcca

SEQ ID NO: 14426 - DNA, 20 bp, synthetic construct
  misc_feature 1..20: note = Description of Artificial Sequence: Synthetic oligonucleotide
  misc_feature 1..20: note = Target: ANGPTL4; (-) strand; PAM type: YTN; PAM sequence: CTG
  source 1..20: mol_type = other DNA
accctagggtgtgagagggg

SEQ ID NO: 14427 - DNA, 20 bp, synthetic construct
  misc_feature 1..20: note = Description of Artificial Sequence: Synthetic oligonucleotide
  misc_feature 1..20: note = Target: ANGPTL4; (-) strand; PAM type: YTN; PAM sequence: CTG
  source 1..20: mol_type = other DNA
ccactgaccctagggtgtga

SEQ ID NO: 14428 - DNA, 20 bp, synthetic construct
  misc_feature 1..20: note = Description of Artificial Sequence: Synthetic oligonucleotide
  misc_feature 1..20: note = Target: ANGPTL4; (-) strand; PAM type: YTN; PAM sequence: CTG
  source 1..20: mol_type = other DNA
gaagcctgccactgacccta

SEQ ID NO: 14429 - DNA, 20 bp, synthetic construct
  misc_feature 1..20: note = Description of Artificial Sequence: Synthetic oligonucleotide
  misc_feature 1..20: note = Target: ANGPTL4; (-) strand; PAM type: YTN; PAM sequence: CTA
  source 1..20: mol_type = other DNA
cagtgctggaagcctgccac

SEQ ID NO: 14430 - DNA, 20 bp, synthetic construct
  misc_feature 1..20: note = Description of Artificial Sequence: Synthetic oligonucleotide
  misc_feature 1..20: note = Target: ANGPTL4; (-) strand; PAM type: YTN; PAM sequence: CTC
  source 1..20: mol_type = other DNA
aggtctacagtgctggaagc

SEQ ID NO: 14431 - DNA, 20 bp, synthetic construct
  misc_feature 1..20: note = Description of Artificial Sequence: Synthetic oligonucleotide
  misc_feature 1..20: note = Target: ANGPTL4; (-) strand; PAM type: YTN; PAM sequence: TTG
  source 1..20: mol_type = other DNA
gggaggagagaaccctcagg

SEQ ID NO: 14432 - DNA, 20 bp, synthetic construct
  misc_feature 1..20: note = Description of Artificial Sequence: Synthetic oligonucleotide
  misc_feature 1..20: note = Target: ANGPTL4; (-) strand; PAM type: YTN; PAM sequence: CTT
  source 1..20: mol_type = other DNA
ggggaggagagaaccctcag

SEQ ID NO: 14433 - DNA, 20 bp, synthetic construct
  misc_feature 1..20: note = Description of Artificial Sequence: Synthetic oligonucleotide
  misc_feature 1..20: note = Target: ANGPTL4; (-) strand; PAM type: YTN; PAM sequence: TTG
  source 1..20: mol_type = other DNA
ggggcgggcagcacggaggt

SEQ ID NO: 14434 - DNA, 20 bp, synthetic construct
  misc_feature 1..20: note = Description of Artificial Sequence: Synthetic oligonucleotide
  misc_feature 1..20: note = Target: ANGPTL4; (-) strand; PAM type: YTN; PAM sequence: CTG
  source 1..20: mol_type = other DNA
gcggggttgggggcgggcag

SEQ ID NO: 14435 - DNA, 20 bp, synthetic construct
  misc_feature 1..20: note = Description of Artificial Sequence: Synthetic oligonucleotide
  misc_feature 1..20: note = Target: ANGPTL4; (-) strand; PAM type: YTN; PAM sequence: CTA
  source 1..20: mol_type = other DNA
gcctggcggggttgggggcg

SEQ ID NO: 14436 - DNA, 20 bp, synthetic construct
  misc_feature 1..20: note = Description of Artificial Sequence: Synthetic oligonucleotide
  misc_feature 1..20: note = Target: ANGPTL4; (-) strand; PAM type: YTN; PAM sequence: CTG
  source 1..20: mol_type = other DNA
agatgctagcctggcggggt

SEQ ID NO: 14437 - DNA, 20 bp, synthetic construct
  misc_feature 1..20: note = Description of Artificial Sequence: Synthetic oligonucleotide
  misc_feature 1..20: note = Target: ANGPTL4; (-) strand; PAM type: YTN; PAM sequence: CTG
  source 1..20: mol_type = other DNA
accacgctgagatgctagcc

SEQ ID NO: 14438 - DNA, 20 bp, synthetic construct
  misc_feature 1..20: note = Description of Artificial Sequence: Synthetic oligonucleotide
  misc_feature 1..20: note = Target: ANGPTL4; (-) strand; PAM type: YTN; PAM sequence: TTG
  source 1..20: mol_type = other DNA
ggagggtggacaggaccctg

SEQ ID NO: 14439 - DNA, 20 bp, synthetic construct
  misc_feature 1..20: note = Description of Artificial Sequence: Synthetic oligonucleotide
  misc_feature 1..20: note = Target: ANGPTL4; (-) strand; PAM type: YTN; PAM sequence: TTT
  source 1..20: mol_type = other DNA
gggagggtggacaggaccct

SEQ ID NO: 14440 - DNA, 20 bp, synthetic construct
  misc_feature 1..20: note = Description of Artificial Sequence: Synthetic oligonucleotide
  misc_feature 1..20: note = Target: ANGPTL4; (-) strand; PAM type: YTN; PAM sequence: CTT
  source 1..20: mol_type = other DNA
tgggagggtggacaggaccc

SEQ ID NO: 14441 - DNA, 20 bp, synthetic construct
  misc_feature 1..20: note = Description of Artificial Sequence: Synthetic oligonucleotide
  misc_feature 1..20: note = Target: ANGPTL4; (-) strand; PAM type: YTN; PAM sequence: CTG
  source 1..20: mol_type = other DNA
ggatggtggctttgggaggg

SEQ ID NO: 14442 - DNA, 20 bp, synthetic construct
  misc_feature 1..20: note = Description of Artificial Sequence: Synthetic oligonucleotide
  misc_feature 1..20: note = Target: ANGPTL4; (-) strand; PAM type: YTN; PAM sequence: CTC
  source 1..20: mol_type = other DNA
atcctgggatggtggctttg

SEQ ID NO: 14443 - DNA, 20 bp, synthetic construct
  misc_feature 1..20: note = Description of Artificial Sequence: Synthetic oligonucleotide
  misc_feature 1..20: note = Target: ANGPTL4; (-) strand; PAM type: YTN; PAM sequence: CTC
  source 1..20: mol_type = other DNA
cagaagcccctcatcctggg

SEQ ID NO: 14444 - DNA, 20 bp, synthetic construct
  misc_feature 1..20: note = Description of Artificial Sequence: Synthetic oligonucleotide
  misc_feature 1..20: note = Target: ANGPTL4; (-) strand; PAM type: YTN; PAM sequence: TTC
  source 1..20: mol_type = other DNA
ccccgtcaccctccagaagc

SEQ ID NO: 14445 - DNA, 20 bp, synthetic construct
  misc_feature 1..20: note = Description of Artificial Sequence: Synthetic oligonucleotide
  misc_feature 1..20: note = Target: ANGPTL4; (-) strand; PAM type: YTN; PAM sequence: CTT
  source 1..20: mol_type = other DNA
cccccgtcaccctccagaag

SEQ ID NO: 14446 - DNA, 20 bp, synthetic construct
  misc_feature 1..20: note = Description of Artificial Sequence: Synthetic oligonucleotide
  misc_feature 1..20: note = Target: ANGPTL4; (-) strand; PAM type: YTN; PAM sequence: TTG
  source 1..20: mol_type = other DNA
tgccttcccccgtcaccctc

SEQ ID NO: 14447 - DNA, 20 bp, synthetic construct
  misc_feature 1..20: note = Description of Artificial Sequence: Synthetic oligonucleotide
  misc_feature 1..20: note = Target: ANGPTL4; (-) strand; PAM type: YTN; PAM sequence: CTT
  source 1..20: mol_type = other DNA
gtgccttcccccgtcaccct

SEQ ID NO: 14448 - DNA, 20 bp, synthetic construct
  misc_feature 1..20: note = Description of Artificial Sequence: Synthetic oligonucleotide
  misc_feature 1..20: note = Target: ANGPTL4; (-) strand; PAM type: YTN; PAM sequence: TTC
  source 1..20: mol_type = other DNA
ccagccaggacttgtgcctt

SEQ ID NO: 14449 - DNA, 20 bp, synthetic construct
  misc_feature 1..20: note = Description of Artificial Sequence: Synthetic oligonucleotide
  misc_feature 1..20: note = Target: ANGPTL4; (-) strand; PAM type: YTN; PAM sequence: TTT
  source 1..20: mol_type = other DNA
cccagccaggacttgtgcct

SEQ ID NO: 14450 - DNA, 20 bp, synthetic construct
  misc_feature 1..20: note = Description of Artificial Sequence: Synthetic oligonucleotide
  misc_feature 1..20: note = Target: ANGPTL4; (-) strand; PAM type: YTN; PAM sequence: TTC
  source 1..20: mol_type = other DNA
caccgcatttcccagccagg

SEQ ID NO: 14451 - DNA, 20 bp, synthetic construct
  misc_feature 1..20: note = Description of Artificial Sequence: Synthetic oligonucleotide
  misc_feature 1..20: note = Target: ANGPTL4; (-) strand; PAM type: YTN; PAM sequence: CTT
  source 1..20: mol_type = other DNA
ccaccgcatttcccagccag

SEQ ID NO: 14452 - DNA, 20 bp, synthetic construct
  misc_feature 1..20: note = Description of Artificial Sequence: Synthetic oligonucleotide
  misc_feature 1..20: note = Target: ANGPTL4; (-) strand; PAM type: YTN; PAM sequence: CTG
  source 1..20: mol_type = other DNA
cccccttccaccgcatttcc

SEQ ID NO: 14453 - DNA, 20 bp, synthetic construct
  misc_feature 1..20: note = Description of Artificial Sequence: Synthetic oligonucleotide
  misc_feature 1..20: note = Target: ANGPTL4; (-) strand; PAM type: YTN; PAM sequence: CTG
  source 1..20: mol_type = other DNA
ggagtcccgaacccacagaa

SEQ ID NO: 14454 - DNA, 20 bp, synthetic construct
  misc_feature 1..20: note = Description of Artificial Sequence: Synthetic oligonucleotide
  misc_feature 1..20: note = Target: ANGPTL4; (-) strand; PAM type: YTN; PAM sequence: CTG
  source 1..20: mol_type = other DNA
agccaagagtctgggagtcc

SEQ ID NO: 14455 - DNA, 20 bp, synthetic construct
  misc_feature 1..20: note = Description of Artificial Sequence: Synthetic oligonucleotide
  misc_feature 1..20: note = Target: ANGPTL4; (-) strand; PAM type: YTN; PAM sequence: TTG
  source 1..20: mol_type = other DNA
gcgggcctgagccaagagtc

SEQ ID NO: 14456 - DNA, 20 bp, synthetic construct
  misc_feature 1..20: note = Description of Artificial Sequence: Synthetic oligonucleotide
  misc_feature 1..20: note = Target: ANGPTL4; (-) strand; PAM type: YTN; PAM sequence: CTT
  source 1..20: mol_type = other DNA
ggcgggcctgagccaagagt

SEQ ID NO: 14457 - DNA, 20 bp, synthetic construct
  misc_feature 1..20: note = Description of Artificial Sequence: Synthetic oligonucleotide
  misc_feature 1..20: note = Target: ANGPTL4; (-) strand; PAM type: YTN; PAM sequence: CTA
  source 1..20: mol_type = other DNA
cttggcgggcctgagccaag

SEQ ID NO: 14458 - DNA, 20 bp, synthetic construct
  misc_feature 1..20: note = Description of Artificial Sequence: Synthetic oligonucleotide
  misc_feature 1..20: note = Target: ANGPTL4; (-) strand; PAM type: YTN; PAM sequence: CTC
  source 1..20: mol_type = other DNA
ctacttggcgggcctgagcc

SEQ ID NO: 14459 - DNA, 20 bp, synthetic construct
  misc_feature 1..20: note = Description of Artificial Sequence: Synthetic oligonucleotide
  misc_feature 1..20: note = Target: ANGPTL4; (-) strand; PAM type: YTN; PAM sequence: TTC
  source 1..20: mol_type = other DNA
tcctacttggcgggcctgag

SEQ ID NO: 14460 - DNA, 20 bp, synthetic construct
  misc_feature 1..20: note = Description of Artificial Sequence: Synthetic oligonucleotide
  misc_feature 1..20: note = Target: ANGPTL4; (-) strand; PAM type: YTN; PAM sequence: TTT
  source 1..20: mol_type = other DNA
ctcctacttggcgggcctga

SEQ ID NO: 14461 - DNA, 20 bp, synthetic construct
  misc_feature 1..20: note = Description of Artificial Sequence: Synthetic oligonucleotide
  misc_feature 1..20: note = Target: ANGPTL4; (-) strand; PAM type: YTN; PAM sequence: CTT
  source 1..20: mol_type = other DNA
tctcctacttggcgggcctg

SEQ ID NO: 14462 - DNA, 20 bp, synthetic construct
  misc_feature 1..20: note = Description of Artificial Sequence: Synthetic oligonucleotide
  misc_feature 1..20: note = Target: ANGPTL4; (-) strand; PAM type: YTN; PAM sequence: CTG
  source 1..20: mol_type = other DNA
aactttctcctacttggcgg

SEQ ID NO: 14463 - DNA, 20 bp, synthetic construct
  misc_feature 1..20: note = Description of Artificial Sequence: Synthetic oligonucleotide
  misc_feature 1..20: note = Target: ANGPTL4; (-) strand; PAM type: YTN; PAM sequence: CTC
  source 1..20: mol_type = other DNA
tgaactttctcctacttggc

SEQ ID NO: 14464 - DNA, 20 bp, synthetic construct
  misc_feature 1..20: note = Description of Artificial Sequence: Synthetic oligonucleotide
  misc_feature 1..20: note = Target: ANGPTL4; (-) strand; PAM type: YTN; PAM sequence: TTC
  source 1..20: mol_type = other DNA
ccagctctgaactttctcct

SEQ ID NO: 14465 - DNA, 20 bp, synthetic construct
  misc_feature 1..20: note = Description of Artificial Sequence: Synthetic oligonucleotide
  misc_feature 1..20: note = Target: ANGPTL4; (-) strand; PAM type: YTN; PAM sequence: CTT
  source 1..20: mol_type = other DNA
cccagctctgaactttctcc

SEQ ID NO: 14466 - DNA, 20 bp, synthetic construct
  misc_feature 1..20: note = Description of Artificial Sequence: Synthetic oligonucleotide
  misc_feature 1..20: note = Target: ANGPTL4; (-) strand; PAM type: YTN; PAM sequence: TTC
  source 1..20: mol_type = other DNA
gccttcccagctctgaactt

SEQ ID NO: 14467 - DNA, 20 bp, synthetic construct
  misc_feature 1..20: note = Description of Artificial Sequence: Synthetic oligonucleotide
  misc_feature 1..20: note = Target: ANGPTL4; (-) strand; PAM type: YTN; PAM sequence: CTG
  source 1..20: mol_type = other DNA
ttcgccttcccagctctgaa

SEQ ID NO: 14468 - DNA, 20 bp, synthetic construct
  misc_feature 1..20: note = Description of Artificial Sequence: Synthetic oligonucleotide
  misc_feature 1..20: note = Target: ANGPTL4; (-) strand; PAM type: YTN; PAM sequence: TTC
  source 1..20: mol_type = other DNA
catgaatgccagctgttcgc

SEQ ID NO: 14469 - DNA, 20 bp, synthetic construct
  misc_feature 1..20: note = Description of Artificial Sequence: Synthetic oligonucleotide
  misc_feature 1..20: note = Target: ANGPTL4; (-) strand; PAM type: YTN; PAM sequence: CTT
  source 1..20: mol_type = other DNA
ccatgaatgccagctgttcg

SEQ ID NO: 14470 - DNA, 20 bp, synthetic construct
  misc_feature 1..20: note = Description of Artificial Sequence: Synthetic oligonucleotide
  misc_feature 1..20: note = Target: ANGPTL4; (-) strand; PAM type: YTN; PAM sequence: CTC
  source 1..20: mol_type = other DNA
ccatccagtaaggatgggca

SEQ ID NO: 14471 - DNA, 20 bp, synthetic construct
  misc_feature 1..20: note = Description of Artificial Sequence: Synthetic oligonucleotide
  misc_feature 1..20: note = Target: ANGPTL4; (-) strand; PAM type: YTN; PAM sequence: TTC
  source 1..20: mol_type = other DNA
ctcccatccagtaaggatgg

SEQ ID NO: 14472 - DNA, 20 bp, synthetic construct
  misc_feature 1..20: note = Description of Artificial Sequence: Synthetic oligonucleotide
  misc_feature 1..20: note = Target: ANGPTL4; (-) strand; PAM type: YTN; PAM sequence: TTT
  source 1..20: mol_type = other DNA
cctcccatccagtaaggatg

SEQ ID NO: 14473 - DNA, 20 bp, synthetic construct
  misc_feature 1..20: note = Description of Artificial Sequence: Synthetic oligonucleotide
  misc_feature 1..20: note = Target: ANGPTL4; (-) strand; PAM type: YTN; PAM sequence: CTT
  source 1..20: mol_type = other DNA
tcctcccatccagtaaggat

SEQ ID NO: 14474 - DNA, 20 bp, synthetic construct
  misc_feature 1..20: note = Description of Artificial Sequence: Synthetic oligonucleotide
  misc_feature 1..20: note = Target: ANGPTL4; (-) strand; PAM type: YTN; PAM sequence: CTA
  source 1..20: mol_type = other DNA
ctttcctcccatccagtaag

SEQ ID NO: 14475 - DNA, 20 bp, synthetic construct
  misc_feature 1..20: note = Description of Artificial Sequence: Synthetic oligonucleotide
  misc_feature 1..20: note = Target: ANGPTL4; (-) strand; PAM type: YTN; PAM sequence: TTC
  source 1..20: mol_type = other DNA
ccctactttcctcccatcca

SEQ ID NO: 14476 - DNA, 20 bp, synthetic construct
  misc_feature 1..20: note = Description of Artificial Sequence: Synthetic oligonucleotide
  misc_feature 1..20: note = Target: ANGPTL4; (-) strand; PAM type: YTN; PAM sequence: TTT
  source 1..20: mol_type = other DNA
cccctactttcctcccatcc

SEQ ID NO: 14477 - DNA, 20 bp, synthetic construct
  misc_feature 1..20: note = Description of Artificial Sequence: Synthetic oligonucleotide
  misc_feature 1..20: note = Target: ANGPTL4; (-) strand; PAM type: YTN; PAM sequence: CTT
  source 1..20: mol_type = other DNA
tcccctactttcctcccatc

SEQ ID NO: 14478 - DNA, 20 bp, synthetic construct
  misc_feature 1..20: note = Description of Artificial Sequence: Synthetic oligonucleotide
  misc_feature 1..20: note = Target: ANGPTL4; (-) strand; PAM type: YTN; PAM sequence: CTC
  source 1..20: mol_type = other DNA
ccctttcccctactttcctc

SEQ ID NO: 14479 - DNA, 20 bp, synthetic construct
  misc_feature 1..20: note = Description of Artificial Sequence: Synthetic oligonucleotide
  misc_feature 1..20: note = Target: ANGPTL4; (-) strand; PAM type: YTN; PAM sequence: CTC
  source 1..20: mol_type = other DNA
aggcatctcccctttcccct

SEQ ID NO: 14480 - DNA, 20 bp, synthetic construct
  misc_feature 1..20: note = Description of Artificial Sequence: Synthetic oligonucleotide
  misc_feature 1..20: note = Target: ANGPTL4; (-) strand; PAM type: YTN; PAM sequence: TTC
  source 1..20: mol_type = other DNA
cggcccctcaggcatctccc

SEQ ID NO: 14481 - DNA, 20 bp, synthetic construct
  misc_feature 1..20: note = Description of Artificial Sequence: Synthetic oligonucleotide
  misc_feature 1..20: note = Target: ANGPTL4; (-) strand; PAM type: YTN; PAM sequence: TTT
  source 1..20: mol_type = other DNA
ccggcccctcaggcatctcc

SEQ ID NO: 14482 - DNA, 20 bp, synthetic construct
  misc_feature 1..20: note = Description of Artificial Sequence: Synthetic oligonucleotide
  misc_feature 1..20: note = Target: ANGPTL4; (-) strand; PAM type: YTN; PAM sequence: CTT
  source 1..20: mol_type = other DNA
tccggcccctcaggcatctc

SEQ ID NO: 14483 - DNA, 20 bp, synthetic construct
  misc_feature 1..20: note = Description of Artificial Sequence: Synthetic oligonucleotide
  misc_feature 1..20: note = Target: ANGPTL4; (-) strand; PAM type: YTN; PAM sequence: CTG
  source 1..20: mol_type = other DNA
cacggtgggggtgggggcgg

SEQ ID NO: 14484 - DNA, 20 bp, synthetic construct
  misc_feature 1..20: note = Description of Artificial Sequence: Synthetic oligonucleotide
  misc_feature 1..20: note = Target: ANGPTL4; (-) strand; PAM type: YTN; PAM sequence: CTG
  source 1..20: mol_type = other DNA
ggaggaaccgcccccagccc

SEQ ID NO: 14485 - DNA, 20 bp, synthetic construct
  misc_feature 1..20: note = Description of Artificial Sequence: Synthetic oligonucleotide
  misc_feature 1..20: note = Target: ANGPTL4; (-) strand; PAM type: YTN; PAM sequence: CTC
  source 1..20: mol_type = other DNA
cagactgggaggaaccgccc

SEQ ID NO: 14486 - DNA, 20 bp, synthetic construct
  misc_feature 1..20: note = Description of Artificial Sequence: Synthetic oligonucleotide
  misc_feature 1..20: note = Target: ANGPTL4; (-) strand; PAM type: YTN; PAM sequence: CTC
  source 1..20: mol_type = other DNA
agacgctccagactgggagg

SEQ ID NO: 14487 - DNA, 20 bp, synthetic construct
  misc_feature 1..20: note = Description of Artificial Sequence: Synthetic oligonucleotide
  misc_feature 1..20: note = Target: ANGPTL4; (-) strand; PAM type: YTN; PAM sequence: CTG
  source 1..20: mol_type = other DNA
gaggctcagacgctccagac

SEQ ID NO: 14488 - DNA, 20 bp, synthetic construct
  misc_feature 1..20: note = Description of Artificial Sequence: Synthetic oligonucleotide
  misc_feature 1..20: note = Target: ANGPTL4; (-) strand; PAM type: YTN; PAM sequence: TTG
  source 1..20: mol_type = other DNA
agcacgtctggaggctcaga

SEQ ID NO: 14489 - DNA, 20 bp, synthetic construct
  misc_feature 1..20: note = Description of Artificial Sequence: Synthetic oligonucleotide
  misc_feature 1..20: note = Target: ANGPTL4; (-) strand; PAM type: YTN; PAM sequence: TTG
  source 1..20: mol_type = other DNA
aggaaagaaagagggaggga

SEQ ID NO: 14490 - DNA, 20 bp, synthetic construct
  misc_feature 1..20: note = Description of Artificial Sequence: Synthetic oligonucleotide
  misc_feature 1..20: note = Target: ANGPTL4; (-) strand; PAM type: YTN; PAM sequence: CTA
  source 1..20: mol_type = other DNA
gagggagaggaggcagggtt

SEQ ID NO: 14491 - DNA, 20 bp, synthetic construct
  misc_feature 1..20: note = Description of Artificial Sequence: Synthetic oligonucleotide
  misc_feature 1..20: note = Target: ANGPTL4; (-) strand; PAM type: YTN; PAM sequence: CTC
  source 1..20: mol_type = other DNA
ctagagggagaggaggcagg

SEQ ID NO: 14492 - DNA, 20 bp, synthetic construct
  misc_feature 1..20: note = Description of Artificial Sequence: Synthetic oligonucleotide
  misc_feature 1..20: note = Target: ANGPTL4; (-) strand; PAM type: YTN; PAM sequence: CTG
  source 1..20: mol_type = other DNA
gggtcccagctcctagaggg

SEQ ID NO: 14493 - DNA, 20 bp, synthetic construct
  misc_feature 1..20: note = Description of Artificial Sequence: Synthetic oligonucleotide
  misc_feature 1..20: note = Target: ANGPTL4; (-) strand; PAM type: YTN; PAM sequence: CTG
  source 1..20: mol_type = other DNA
cctggggtcccagctcctag

SEQ ID NO: 14494 - DNA, 20 bp, synthetic construct
  misc_feature 1..20: note = Description of Artificial Sequence: Synthetic oligonucleotide
  misc_feature 1..20: note = Target: ANGPTL4; (-) strand; PAM type: YTN; PAM sequence: CTC
  source 1..20: mol_type = other DNA
tgcctggggtcccagctcct

SEQ ID NO: 14495 - DNA, 20 bp, synthetic construct
  misc_feature 1..20: note = Description of Artificial Sequence: Synthetic oligonucleotide
  misc_feature 1..20: note = Target: ANGPTL4; (-) strand; PAM type: YTN; PAM sequence: CTC
  source 1..20: mol_type = other DNA
agaggctctgcctggggtcc

SEQ ID NO: 14496 - DNA, 20 bp, synthetic construct
  misc_feature 1..20: note = Description of Artificial Sequence: Synthetic oligonucleotide
  misc_feature 1..20: note = Target: ANGPTL4; (-) strand; PAM type: YTN; PAM sequence: CTG
  source 1..20: mol_type = other DNA
agcaggagcatctcagaggc

SEQ ID NO: 14497 - DNA, 20 bp, synthetic construct
  misc_feature 1..20: note = Description of Artificial Sequence: Synthetic oligonucleotide
  misc_feature 1..20: note = Target: ANGPTL4; (-) strand; PAM type: YTN; PAM sequence: CTG
  source 1..20: mol_type = other DNA
tgctgagcaggagcatctca

SEQ ID NO: 14498 - DNA, 20 bp, synthetic construct
  misc_feature 1..20: note = Description of Artificial Sequence: Synthetic oligonucleotide
  misc_feature 1..20: note = Target: ANGPTL4; (-) strand; PAM type: YTN; PAM sequence: TTG
  source 1..20: mol_type = other DNA
acaaatgaatgaatgaatga

SEQ ID NO: 14499 - DNA, 20 bp, synthetic construct
  misc_feature 1..20: note = Description of Artificial Sequence: Synthetic oligonucleotide
  misc_feature 1..20: note = Target: ANGPTL4; (-) strand; PAM type: YTN; PAM sequence: CTT
  source 1..20: mol_type = other DNA
gacaaatgaatgaatgaatg

SEQ ID NO: 14500 - DNA, 20 bp, synthetic construct
  misc_feature 1..20: note = Description of Artificial Sequence: Synthetic oligonucleotide
  misc_feature 1..20: note = Target: ANGPTL4; (-) strand; PAM type: YTN; PAM sequence: CTC
  source 1..20: mol_type = other DNA
aaaaagcaaacaaaacagtc

SEQ ID NO: 14501 - DNA, 20 bp, synthetic construct
  misc_feature 1..20: note = Description of Artificial Sequence: Synthetic oligonucleotide
  misc_feature 1..20: note = Target: ANGPTL4; (-) strand; PAM type: YTN; PAM sequence: CTC
  source 1..20: mol_type = other DNA
cgtctcaaaaagcaaacaaa

SEQ ID NO: 14502 - DNA, 20 bp, synthetic construct
  misc_feature 1..20: note = Description of Artificial Sequence: Synthetic oligonucleotide
  misc_feature 1..20: note = Target: ANGPTL4; (-) strand; PAM type: YTN; PAM sequence: CTG
  source 1..20: mol_type = other DNA
gacaacagagcgagactccg

SEQ ID NO: 14503 - DNA, 20 bp, synthetic construct
  misc_feature 1..20: note = Description of Artificial Sequence: Synthetic oligonucleotide
  misc_feature 1..20: note = Target: ANGPTL4; (-) strand; PAM type: YTN; PAM sequence: CTC
  source 1..20: mol_type = other DNA
cagcctggacaacagagcga

SEQ ID NO: 14504 - DNA, 20 bp, synthetic construct
  misc_feature 1..20: note = Description of Artificial Sequence: Synthetic oligonucleotide
  misc_feature 1..20: note = Target: ANGPTL4; (-) strand; PAM type: YTN; PAM sequence: CTG
  source 1..20: mol_type = other DNA
cactccagcctggacaacag

SEQ ID NO: 14505 - DNA, 20 bp, synthetic construct
  misc_feature 1..20: note = Description of Artificial Sequence: Synthetic oligonucleotide
  misc_feature 1..20: note = Target: ANGPTL4; (-) strand; PAM type: YTN; PAM sequence: TTG
  source 1..20: mol_type = other DNA
cgccactgcactccagcctg

SEQ ID NO: 14506 - DNA, 20 bp, synthetic construct
  misc_feature 1..20: note = Description of Artificial Sequence: Synthetic oligonucleotide
  misc_feature 1..20: note = Target: ANGPTL4; (-) strand; PAM type: YTN; PAM sequence: CTG
  source 1..20: mol_type = other DNA
agattgcgccactgcactcc

SEQ ID NO: 14507 - DNA, 20 bp, synthetic construct
  misc_feature 1..20: note = Description of Artificial Sequence: Synthetic oligonucleotide
  misc_feature 1..20: note = Target: ANGPTL4; (-) strand; PAM type: YTN; PAM sequence: TTG
  source 1..20: mol_type = other DNA
cagtgagctgagattgcgcc

SEQ ID NO: 14508 - DNA, 20 bp, synthetic construct
  misc_feature 1..20: note = Description of Artificial Sequence: Synthetic oligonucleotide
  misc_feature 1..20: note = Target: ANGPTL4; (-) strand; PAM type: YTN; PAM sequence: TTG
  source 1..20: mol_type = other DNA
aacccagtgggaggcagagg

SEQ ID NO: 14509 - DNA, 20 bp, synthetic construct
  misc_feature 1..20: note = Description of Artificial Sequence: Synthetic oligonucleotide
  misc_feature 1..20: note = Target: ANGPTL4; (-) strand; PAM type: YTN; PAM sequence: CTT
  source 1..20: mol_type = other DNA
gaacccagtgggaggcagag

SEQ ID NO: 14510 - DNA, 20 bp, synthetic construct
  misc_feature 1..20: note = Description of Artificial Sequence: Synthetic oligonucleotide
  misc_feature 1..20: note = Target: ANGPTL4; (-) strand; PAM type: YTN; PAM sequence: CTG
  source 1..20: mol_type = other DNA
aggcaggagaatcacttgaa

SEQ ID NO: 14511 - DNA, 20 bp, synthetic construct
  misc_feature 1..20: note = Description of Artificial Sequence: Synthetic oligonucleotide
  misc_feature 1..20: note = Target: ANGPTL4; (-) strand; PAM type: YTN; PAM sequence: TTG
  source 1..20: mol_type = other DNA
agaggctgaggcaggagaat

SEQ ID NO: 14512 - DNA, 20 bp, synthetic construct
  misc_feature 1..20: note = Description of Artificial Sequence: Synthetic oligonucleotide
  misc_feature 1..20: note = Target: ANGPTL4; (-) strand; PAM type: YTN; PAM sequence: CTT
  source 1..20: mol_type = other DNA
gagaggctgaggcaggagaa

SEQ ID NO: 14513 - DNA, 20 bp, synthetic construct
  misc_feature 1..20: note = Description of Artificial Sequence: Synthetic oligonucleotide
  misc_feature 1..20: note = Target: ANGPTL4; (-) strand; PAM type: YTN; PAM sequence: CTA
  source 1..20: mol_type = other DNA
cttgagaggctgaggcagga

SEQ ID NO: 14514 - DNA, 20 bp, synthetic construct
  misc_feature 1..20: note = Description of Artificial Sequence: Synthetic oligonucleotide
  misc_feature 1..20: note = Target: ANGPTL4; (-) strand; PAM type: YTN; PAM sequence: CTA
  source 1..20: mol_type = other DNA
taatcccatctacttgagag

SEQ ID NO: 14515 - DNA, 20 bp, synthetic construct
  misc_feature 1..20: note = Description of Artificial Sequence: Synthetic oligonucleotide
  misc_feature 1..20: note = Target: ANGPTL4; (-) strand; PAM type: YTN; PAM sequence: CTG
  source 1..20: mol_type = other DNA
ggcgtggtggcggtaggcgc

SEQ ID NO: 14516 - DNA, 20 bp, synthetic construct
  misc_feature 1..20: note = Description of Artificial Sequence: Synthetic oligonucleotide
  misc_feature 1..20: note = Target: ANGPTL4; (-) strand; PAM type: YTN; PAM sequence: TTA
  source 1..20: mol_type = other DNA
gctgggcgtggtggcggtag

SEQ ID NO: 14517 - DNA, 20 bp, synthetic construct
  misc_feature 1..20: note = Description of Artificial Sequence: Synthetic oligonucleotide
  misc_feature 1..20: note = Target: ANGPTL4; (-) strand; PAM type: YTN; PAM sequence: TTG
  source 1..20: mol_type = other DNA
ataaatgaataaaaattagc

SEQ ID NO: 14518 - DNA, 20 bp, synthetic construct
  misc_feature 1..20: note = Description of Artificial Sequence: Synthetic oligonucleotide
  misc_feature 1..20: note = Target: ANGPTL4; (-) strand; PAM type: YTN; PAM sequence: CTT
  source 1..20: mol_type = other DNA
gataaatgaataaaaattag

SEQ ID NO: 14519 - DNA, 20 bp, synthetic construct
  misc_feature 1..20: note = Description of Artificial Sequence: Synthetic oligonucleotide
  misc_feature 1..20: note = Target: ANGPTL4; (-) strand; PAM type: YTN; PAM sequence: CTC
  source 1..20: mol_type = other DNA
aaaaaaaaaaaagacttgat

SEQ ID NO: 14520 - DNA, 20 bp, synthetic construct
  misc_feature 1..20: note = Description of Artificial Sequence: Synthetic oligonucleotide
  misc_feature 1..20: note = Target: ANGPTL4; (-) strand; PAM type: YTN; PAM sequence: CTG
  source 1..20: mol_type = other DNA
tctcaaaaaaaaaaaagact

SEQ ID NO: 14521 - DNA, 20 bp, synthetic construct
  misc_feature 1..20: note = Description of Artificial Sequence: Synthetic oligonucleotide
  misc_feature 1..20: note = Target: ANGPTL4; (-) strand; PAM type: YTN; PAM sequence: CTC
  source 1..20: mol_type = other DNA
tgtctcaaaaaaaaaaaaga

SEQ ID NO: 14522 - DNA, 20 bp, synthetic construct
  misc_feature 1..20: note = Description of Artificial Sequence: Synthetic oligonucleotide
  misc_feature 1..20: note = Target: ANGPTL4; (-) strand; PAM type: YTN; PAM sequence: CTG
  source 1..20: mol_type = other DNA
ggtgacagagtgagactctg

SEQ ID NO: 14523 - DNA, 20 bp, synthetic construct
  misc_feature 1..20: note = Description of Artificial Sequence: Synthetic oligonucleotide
  misc_feature 1..20: note = Target: ANGPTL4; (-) strand; PAM type: YTN; PAM sequence: CTC
  source 1..20: mol_type = other DNA
caacctgggtgacagagtga

SEQ ID NO: 14524 - DNA, 20 bp, synthetic construct
  misc_feature 1..20: note = Description of Artificial Sequence: Synthetic oligonucleotide
  misc_feature 1..20: note = Target: ANGPTL4; (-) strand; PAM type: YTN; PAM sequence: TTG
  source 1..20: mol_type = other DNA
cactccaacctgggtgacag

SEQ ID NO: 14525 - DNA, 20 bp, synthetic construct
  misc_feature 1..20: note = Description of Artificial Sequence: Synthetic oligonucleotide
  misc_feature 1..20: note = Target: ANGPTL4; (-) strand; PAM type: YTN; PAM sequence: TTG
  source 1..20: mol_type = other DNA
aaccattgcactccaacctg

SEQ ID NO: 14526 - DNA, 20 bp, synthetic construct
  misc_feature 1..20: note = Description of Artificial Sequence: Synthetic oligonucleotide
  misc_feature 1..20: note = Target: ANGPTL4; (-) strand; PAM type: YTN; PAM sequence: CTG
  source 1..20: mol_type = other DNA
aggttgaaccattgcactcc

SEQ ID NO: 14527 - DNA, 20 bp, synthetic construct
  misc_feature 1..20: note = Description of Artificial Sequence: Synthetic oligonucleotide
  misc_feature 1..20: note = Target: ANGPTL4; (-) strand; PAM type: YTN; PAM sequence: TTG
  source 1..20: mol_type = other DNA
cagtcagctgaggttgaacc

SEQ ID NO: 14528 - DNA, 20 bp, synthetic construct
  misc_feature 1..20: note = Description of Artificial Sequence: Synthetic oligonucleotide
  misc_feature 1..20: note = Target: ANGPTL4; (-) strand; PAM type: YTN; PAM sequence: TTG
  source 1..20: mol_type = other DNA
aacccgggaggcagaggttg

SEQ ID NO: 14529 - DNA, 20 bp, synthetic construct
  misc_feature 1..20: note = Description of Artificial Sequence: Synthetic oligonucleotide
  misc_feature 1..20: note = Target: ANGPTL4; (-) strand; PAM type: YTN; PAM sequence: CTT
  source 1..20: mol_type = other DNA
gaacccgggaggcagaggtt

SEQ ID NO: 14530 - DNA, 20 bp, synthetic construct
  misc_feature 1..20: note = Description of Artificial Sequence: Synthetic oligonucleotide
  misc_feature 1..20: note = Target: ANGPTL4; (-) strand; PAM type: YTN; PAM sequence: TTA
  source 1..20: mol_type = other DNA
ggaggcagaggcaggagaat

SEQ ID NO: 14531 - DNA, 20 bp, synthetic construct
  misc_feature 1..20: note = Description of Artificial Sequence: Synthetic oligonucleotide
  misc_feature 1..20: note = Target: ANGPTL4; (-) strand; PAM type: YTN; PAM sequence: CTT
  source 1..20: mol_type = other DNA
aggaggcagaggcaggagaa

SEQ ID NO: 14532 - DNA, 20 bp, synthetic construct
  misc_feature 1..20: note = Description of Artificial Sequence: Synthetic oligonucleotide
  misc_feature 1..20: note = Target: ANGPTL4; (-) strand; PAM type: YTN; PAM sequence: CTC
  source 1..20: mol_type = other DNA
cttaggaggcagaggcagga

SEQ ID NO: 14533 - DNA, 20 bp, synthetic construct
  misc_feature 1..20: note = Description of Artificial Sequence: Synthetic oligonucleotide
  misc_feature 1..20: note = Target: ANGPTL4; (-) strand; PAM type: YTN; PAM sequence: CTG
  source 1..20: mol_type = other DNA
ggtgtgatggtggacgccag

SEQ ID NO: 14534 - DNA, 20 bp, synthetic construct
  misc_feature 1..20: note = Description of Artificial Sequence: Synthetic oligonucleotide
  misc_feature 1..20: note = Target: ANGPTL4; (-) strand; PAM type: YTN; PAM sequence: TTA
  source 1..20: mol_type = other DNA
gctgggtgtgatggtggacg

SEQ ID NO: 14535 - DNA, 20 bp, synthetic construct
  misc_feature 1..20: note = Description of Artificial Sequence: Synthetic oligonucleotide
  misc_feature 1..20: note = Target: ANGPTL4; (-) strand; PAM type: YTN; PAM sequence: CTA
  source 1..20: mol_type = other DNA
gtaaaacatacaaagattag

SEQ ID NO: 14536 - DNA, 20 bp, synthetic construct
  misc_feature 1..20: note = Description of Artificial Sequence: Synthetic oligonucleotide
  misc_feature 1..20: note = Target: ANGPTL4; (-) strand; PAM type: YTN; PAM sequence: CTC
  source 1..20: mol_type = other DNA
tagtaaaacatacaaagatt

SEQ ID NO: 14537 - DNA, 20 bp, synthetic construct
  misc_feature 1..20: note = Description of Artificial Sequence: Synthetic oligonucleotide
  misc_feature 1..20: note = Target: ANGPTL4; (-) strand; PAM type: YTN; PAM sequence: CTG
  source 1..20: mol_type = other DNA
gtcaacatggccaaacccca

SEQ ID NO: 14538 - DNA, 20 bp, synthetic construct
  misc_feature 1..20: note = Description of Artificial Sequence: Synthetic oligonucleotide
  misc_feature 1..20: note = Target: ANGPTL4; (-) strand; PAM type: YTN; PAM sequence: TTG
  source 1..20: mol_type = other DNA
agaccagcctggtcaacatg

SEQ ID NO: 14539 - DNA, 20 bp, synthetic construct
  misc_feature 1..20: note = Description of Artificial Sequence: Synthetic oligonucleotide
  misc_feature 1..20: note = Target: ANGPTL4; (-) strand; PAM type: YTN; PAM sequence: TTT
  source 1..20: mol_type = other DNA
gagaccagcctggtcaacat

SEQ ID NO: 14540 - DNA, 20 bp, synthetic construct
  misc_feature 1..20: note = Description of Artificial Sequence: Synthetic oligonucleotide
  misc_feature 1..20: note = Target: ANGPTL4; (-) strand; PAM type: YTN; PAM sequence: TTG
  source 1..20: mol_type = other DNA
ggaggcgggcggatcggtca

SEQ ID NO: 14541 - DNA, 20 bp, synthetic construct
  misc_feature 1..20: note = Description of Artificial Sequence: Synthetic oligonucleotide
  misc_feature 1..20: note = Target: ANGPTL4; (-) strand; PAM type: YTN; PAM sequence: TTT
  source 1..20: mol_type = other DNA
gggaggcgggcggatcggtc

SEQ ID NO: 14542 - DNA, 20 bp, synthetic construct
  misc_feature 1..20: note = Description of Artificial Sequence: Synthetic oligonucleotide
  misc_feature 1..20: note = Target: ANGPTL4; (-) strand; PAM type: YTN; PAM sequence: CTT
  source 1..20: mol_type = other DNA
tgggaggcgggcggatcggt

SEQ ID NO: 14543 - DNA, 20 bp, synthetic construct
  misc_feature 1..20: note = Description of Artificial Sequence: Synthetic oligonucleotide
  misc_feature 1..20: note = Target: ANGPTL4; (-) strand; PAM type: YTN; PAM sequence: CTG
  source 1..20: mol_type = other DNA
taatccagcactttgggagg

SEQ ID NO: 14544 - DNA, 20 bp, synthetic construct
  misc_feature 1..20: note = Description of Artificial Sequence: Synthetic oligonucleotide
  misc_feature 1..20: note = Target: ANGPTL4; (-) strand; PAM type: YTN; PAM sequence: TTC
  source 1..20: mol_type = other DNA
atgcctgtaatccagcactt

SEQ ID NO: 14545 - DNA, 20 bp, synthetic construct
  misc_feature 1..20: note = Description of Artificial Sequence: Synthetic oligonucleotide
  misc_feature 1..20: note = Target: ANGPTL4; (-) strand; PAM type: YTN; PAM sequence: TTG
  source 1..20: mol_type = other DNA
aggaatgggccgggcgcagt

SEQ ID NO: 14546 - DNA, 20 bp, synthetic construct
  misc_feature 1..20: note = Description of Artificial Sequence: Synthetic oligonucleotide
  misc_feature 1..20: note = Target: ANGPTL4; (-) strand; PAM type: YTN; PAM sequence: CTT
  source 1..20: mol_type = other DNA
gaggaatgggccgggcgcag

SEQ ID NO: 14547 - DNA, 20 bp, synthetic construct
  misc_feature 1..20: note = Description of Artificial Sequence: Synthetic oligonucleotide
  misc_feature 1..20: note = Target: ANGPTL4; (-) strand; PAM type: YTN; PAM sequence: CTC
  source 1..20: mol_type = other DNA
aataaagacttgaggaatgg

SEQ ID NO: 14548 - DNA, 20 bp, synthetic construct
  misc_feature 1..20: note = Description of Artificial Sequence: Synthetic oligonucleotide
  misc_feature 1..20: note = Target: ANGPTL4; (-) strand; PAM type: YTN; PAM sequence: CTG
  source 1..20: mol_type = other DNA
ctcaataaagacttgaggaa

SEQ ID NO: 14549 - DNA, 20 bp, synthetic construct
  misc_feature 1..20: note = Description of Artificial Sequence: Synthetic oligonucleotide
  misc_feature 1..20: note = Target: ANGPTL4; (-) strand; PAM type: YTN; PAM sequence: CTG
  source 1..20: mol_type = other DNA
gcaccagcatccacgcaggc

SEQ ID NO: 14550 - DNA, 20 bp, synthetic construct
  misc_feature 1..20: note = Description of Artificial Sequence: Synthetic oligonucleotide
  misc_feature 1..20: note = Target: ANGPTL4; (-) strand; PAM type: YTN; PAM sequence: CTG
  source 1..20: mol_type = other DNA
cccacagcctggcaccagca

SEQ ID NO: 14551 - DNA, 20 bp, synthetic construct
  misc_feature 1..20: note = Description of Artificial Sequence: Synthetic oligonucleotide
  misc_feature 1..20: note = Target: ANGPTL4; (-) strand; PAM type: YTN; PAM sequence: CTC
  source 1..20: mol_type = other DNA
tgcccacagcctggcaccag

SEQ ID NO: 14552 - DNA, 20 bp, synthetic construct
  misc_feature 1..20: note = Description of Artificial Sequence: Synthetic oligonucleotide
  misc_feature 1..20: note = Target: ANGPTL4; (-) strand; PAM type: YTN; PAM sequence: CTG
  source 1..20: mol_type = other DNA
gggacaaggagcagctctgc

SEQ ID NO: 14553 - DNA, 20 bp, synthetic construct
  misc_feature 1..20: note = Description of Artificial Sequence: Synthetic oligonucleotide
  misc_feature 1..20: note = Target: ANGPTL4; (-) strand; PAM type: YTN; PAM sequence: CTC
  source 1..20: mol_type = other DNA
catgaggctggggacaagga

SEQ ID NO: 14554 - DNA, 20 bp, synthetic construct
  misc_feature 1..20: note = Description of Artificial Sequence: Synthetic oligonucleotide
  misc_feature 1..20: note = Target: ANGPTL4; (-) strand; PAM type: YTN; PAM sequence: CTC
  source 1..20: mol_type = other DNA
aatggaggctccatgaggct

SEQ ID NO: 14555 - DNA, 20 bp, synthetic construct
  misc_feature 1..20: note = Description of Artificial Sequence: Synthetic oligonucleotide
  misc_feature 1..20: note = Target: ANGPTL4; (-) strand; PAM type: YTN; PAM sequence: CTG
  source 1..20: mol_type = other DNA
actcaatggaggctccatga

SEQ ID NO: 14556 - DNA, 20 bp, synthetic construct
  misc_feature 1..20: note = Description of Artificial Sequence: Synthetic oligonucleotide
  misc_feature 1..20: note = Target: ANGPTL4; (-) strand; PAM type: YTN; PAM sequence: CTC
  source 1..20: mol_type = other DNA
tgactcaatggaggctccat

SEQ ID NO: 14557 - DNA, 20 bp, synthetic construct
  misc_feature 1..20: note = Description of Artificial Sequence: Synthetic oligonucleotide
  misc_feature 1..20: note = Target: ANGPTL4; (-) strand; PAM type: YTN; PAM sequence: CTC
  source 1..20: mol_type = other DNA
ctctgactcaatggaggctc

SEQ ID NO: 14558 - DNA, 20 bp, synthetic construct
  misc_feature 1..20: note = Description of Artificial Sequence: Synthetic oligonucleotide
  misc_feature 1..20: note = Target: ANGPTL4; (-) strand; PAM type: YTN; PAM sequence: CTC
  source 1..20: mol_type = other DNA
tcctctgactcaatggaggc

SEQ ID NO: 14559 - DNA, 20 bp, synthetic construct
  misc_feature 1..20: note = Description of Artificial Sequence: Synthetic oligonucleotide
  misc_feature 1..20: note = Target: ANGPTL4; (-) strand; PAM type: YTN; PAM sequence: CTA
  source 1..20: mol_type = other DNA
atggtctctcctctgactca

SEQ ID NO: 14560 - DNA, 20 bp, synthetic construct
  misc_feature 1..20: note = Description of Artificial Sequence: Synthetic oligonucleotide
  misc_feature 1..20: note = Target: ANGPTL4; (-) strand; PAM type: YTN; PAM sequence: CTG
  source 1..20: mol_type = other DNA
aggtcatctaatggtctctc

SEQ ID NO: 14561 - DNA, 20 bp, synthetic construct
  misc_feature 1..20: note = Description of Artificial Sequence: Synthetic oligonucleotide
  misc_feature 1..20: note = Target: ANGPTL4; (-) strand; PAM type: YTN; PAM sequence: CTG
  source 1..20: mol_type = other DNA
gacactgaggtcatctaatg

SEQ ID NO: 14562 - DNA, 20 bp, synthetic construct
  misc_feature 1..20: note = Description of Artificial Sequence: Synthetic oligonucleotide
  misc_feature 1..20: note = Target: ANGPTL4; (-) strand; PAM type: YTN; PAM sequence: CTC
  source 1..20: mol_type = other DNA
ctggacactgaggtcatcta

SEQ ID NO: 14563 - DNA, 20 bp, synthetic construct
  misc_feature 1..20: note = Description of Artificial Sequence: Synthetic oligonucleotide
  misc_feature 1..20: note = Target: ANGPTL4; (-) strand; PAM type: YTN; PAM sequence: TTC
  source 1..20: mol_type = other DNA
ccactcctggacactgaggt

SEQ ID NO: 14564 - DNA, 20 bp, synthetic construct
  misc_feature 1..20: note = Description of Artificial Sequence: Synthetic oligonucleotide
  misc_feature 1..20: note = Target: ANGPTL4; (-) strand; PAM type: YTN; PAM sequence: CTT
  source 1..20: mol_type = other DNA
cccactcctggacactgagg

SEQ ID NO: 14565 - DNA, 20 bp, synthetic construct
  misc_feature 1..20: note = Description of Artificial Sequence: Synthetic oligonucleotide
  misc_feature 1..20: note = Target: ANGPTL4; (-) strand; PAM type: YTN; PAM sequence: TTG
  source 1..20: mol_type = other DNA
agcaaggacttcccactcct

SEQ ID NO: 14566 - DNA, 20 bp, synthetic construct
  misc_feature 1..20: note = Description of Artificial Sequence: Synthetic oligonucleotide
  misc_feature 1..20: note = Target: ANGPTL4; (-) strand; PAM type: YTN; PAM sequence: CTC
  source 1..20: mol_type = other DNA
acccccagaccaggccagaa

SEQ ID NO: 14567 - DNA, 20 bp, synthetic construct
  misc_feature 1..20: note = Description of Artificial Sequence: Synthetic oligonucleotide
  misc_feature 1..20: note = Target: ANGPTL4; (-) strand; PAM type: YTN; PAM sequence: TTG
  source 1..20: mol_type = other DNA
cctcacccccagaccaggcc

SEQ ID NO: 14568 - DNA, 20 bp, synthetic construct
  misc_feature 1..20: note = Description of Artificial Sequence: Synthetic oligonucleotide
  misc_feature 1..20: note = Target: ANGPTL4; (-) strand; PAM type: YTN; PAM sequence: CTT
  source 1..20: mol_type = other DNA
gcctcacccccagaccaggc

SEQ ID NO: 14569 - DNA, 20 bp, synthetic construct
  misc_feature 1..20: note = Description of Artificial Sequence: Synthetic oligonucleotide
  misc_feature 1..20: note = Target: ANGPTL4; (-) strand; PAM type: YTN; PAM sequence: CTG
  source 1..20: mol_type = other DNA
ccttgcctcacccccagacc

SEQ ID NO: 14570 - DNA, 20 bp, synthetic construct
  misc_feature 1..20: note = Description of Artificial Sequence: Synthetic oligonucleotide
  misc_feature 1..20: note = Target: ANGPTL4; (-) strand; PAM type: YTN; PAM sequence: CTG
  source 1..20: mol_type = other DNA
gaaggacaccctgccttgcc

SEQ ID NO: 14571 - DNA, 20 bp, synthetic construct
  misc_feature 1..20: note = Description of Artificial Sequence: Synthetic oligonucleotide
  misc_feature 1..20: note = Target: ANGPTL4; (-) strand; PAM type: YTN; PAM sequence: TTC
  source 1..20: mol_type = other DNA
tggaaggacaccctgccttg

SEQ ID NO: 14572 - DNA, 20 bp, synthetic construct
  misc_feature 1..20: note = Description of Artificial Sequence: Synthetic oligonucleotide
  misc_feature 1..20: note = Target: ANGPTL4; (-) strand; PAM type: YTN; PAM sequence: CTT
  source 1..20: mol_type = other DNA
ctggaaggacaccctgcctt

SEQ ID NO: 14573 - DNA, 20 bp, synthetic construct
  misc_feature 1..20: note = Description of Artificial Sequence: Synthetic oligonucleotide
  misc_feature 1..20: note = Target: ANGPTL4; (-) strand; PAM type: YTN; PAM sequence: CTG
  source 1..20: mol_type = other DNA
ggtcccagcttctggaagga

SEQ ID NO: 14574 - DNA, 20 bp, synthetic construct
  misc_feature 1..20: note = Description of Artificial Sequence: Synthetic oligonucleotide
  misc_feature 1..20: note = Target: ANGPTL4; (-) strand; PAM type: YTN; PAM sequence: CTC
  source 1..20: mol_type = other DNA
tgggtcccagcttctggaag

SEQ ID NO: 14575 - DNA, 20 bp, synthetic construct
  misc_feature 1..20: note = Description of Artificial Sequence: Synthetic oligonucleotide
  misc_feature 1..20: note = Target: ANGPTL4; (-) strand; PAM type: YTN; PAM sequence: CTC
  source 1..20: mol_type = other DNA
tctgggtcccagcttctgga

SEQ ID NO: 14576 - DNA, 20 bp, synthetic construct
  misc_feature 1..20: note = Description of Artificial Sequence: Synthetic oligonucleotide
  misc_feature 1..20: note = Target: ANGPTL4; (-) strand; PAM type: YTN; PAM sequence: CTC
  source 1..20: mol_type = other DNA
tctctgggtcccagcttctg

SEQ ID NO: 14577 - DNA, 20 bp, synthetic construct
  misc_feature 1..20: note = Description of Artificial Sequence: Synthetic oligonucleotide
  misc_feature 1..20: note = Target: ANGPTL4; (-) strand; PAM type: YTN; PAM sequence: TTC
  source 1..20: mol_type = other DNA
tctctctgggtcccagcttc

SEQ ID NO: 14578 - DNA, 20 bp, synthetic construct
  misc_feature 1..20: note = Description of Artificial Sequence: Synthetic oligonucleotide
  misc_feature 1..20: note = Target: ANGPTL4; (-) strand; PAM type: YTN; PAM sequence: CTT
  source 1..20: mol_type = other DNA
ctctctctgggtcccagctt

SEQ ID NO: 14579 - DNA, 20 bp, synthetic construct
  misc_feature 1..20: note = Description of Artificial Sequence: Synthetic oligonucleotide
  misc_feature 1..20: note = Target: ANGPTL4; (-) strand; PAM type: YTN; PAM sequence: CTC
  source 1..20: mol_type = other DNA
acttctctctctgggtccca

SEQ ID NO: 14580 - DNA, 20 bp, synthetic construct
  misc_feature 1..20: note = Description of Artificial Sequence: Synthetic oligonucleotide
  misc_feature 1..20: note = Target: ANGPTL4; (-) strand; PAM type: YTN; PAM sequence: TTC
  source 1..20: mol_type = other DNA
ctcacttctctctctgggtc

SEQ ID NO: 14581 - DNA, 20 bp, synthetic construct
  misc_feature 1..20: note = Description of Artificial Sequence: Synthetic oligonucleotide
  misc_feature 1..20: note = Target: ANGPTL4; (-) strand; PAM type: YTN; PAM sequence: TTT
  source 1..20: mol_type = other DNA
cctcacttctctctctgggt

SEQ ID NO: 14582 - DNA, 20 bp, synthetic construct
  misc_feature 1..20: note = Description of Artificial Sequence: Synthetic oligonucleotide
  misc_feature 1..20: note = Target: ANGPTL4; (-) strand; PAM type: YTN; PAM sequence: CTT
  source 1..20: mol_type = other DNA
tcctcacttctctctctggg

SEQ ID NO: 14583 - DNA, 20 bp, synthetic construct
  misc_feature 1..20: note = Description of Artificial Sequence: Synthetic oligonucleotide
  misc_feature 1..20: note = Target: ANGPTL4; (-) strand; PAM type: YTN; PAM sequence: CTC
  source 1..20: mol_type = other DNA
tttcctcacttctctctctg

SEQ ID NO: 14584 - DNA, 20 bp, synthetic construct
  misc_feature 1..20: note = Description of Artificial Sequence: Synthetic oligonucleotide
  misc_feature 1..20: note = Target: ANGPTL4; (-) strand; PAM type: YTN; PAM sequence: CTC
  source 1..20: mol_type = other DNA
tctttcctcacttctctctc

SEQ ID NO: 14585 - DNA, 20 bp, synthetic construct
  misc_feature 1..20: note = Description of Artificial Sequence: Synthetic oligonucleotide
  misc_feature 1..20: note = Target: ANGPTL4; (-) strand; PAM type: YTN; PAM sequence: CTG
  source 1..20: mol_type = other DNA
cgcccggcgggactctcttt

SEQ ID NO: 14586 - DNA, 20 bp, synthetic construct
  misc_feature 1..20: note = Description of Artificial Sequence: Synthetic oligonucleotide
  misc_feature 1..20: note = Target: ANGPTL4; (-) strand; PAM type: YTN; PAM sequence: TTA
  source 1..20: mol_type = other DNA
caggtgtgaaccactgcgcc

SEQ ID NO: 14587 - DNA, 20 bp, synthetic construct
  misc_feature 1..20: note = Description of Artificial Sequence: Synthetic oligonucleotide
  misc_feature 1..20: note = Target: ANGPTL4; (-) strand; PAM type: YTN; PAM sequence: CTG
  source 1..20: mol_type = other DNA
ggattacaggtgtgaaccac

SEQ ID NO: 14588 - DNA, 20 bp, synthetic construct
  misc_feature 1..20: note = Description of Artificial Sequence: Synthetic oligonucleotide
  misc_feature 1..20: note = Target: ANGPTL4; (-) strand; PAM type: YTN; PAM sequence: CTC
  source 1..20: mol_type = other DNA
ccaaagtgctgggattacag

SEQ ID NO: 14589 - DNA, 20 bp, synthetic construct
  misc_feature 1..20: note = Description of Artificial Sequence: Synthetic oligonucleotide
  misc_feature 1..20: note = Target: ANGPTL4; (-) strand; PAM type: YTN; PAM sequence: TTG
  source 1..20: mol_type = other DNA
gcctcccaaagtgctgggat

SEQ ID NO: 14590 - DNA, 20 bp, synthetic construct
  misc_feature 1..20: note = Description of Artificial Sequence: Synthetic oligonucleotide
  misc_feature 1..20: note = Target: ANGPTL4; (-) strand; PAM type: YTN; PAM sequence: CTT
  source 1..20: mol_type = other DNA
ggcctcccaaagtgctggga

SEQ ID NO: 14591 - DNA, 20 bp, synthetic construct
  misc_feature 1..20: note = Description of Artificial Sequence: Synthetic oligonucleotide
  misc_feature 1..20: note = Target: ANGPTL4; (-) strand; PAM type: YTN; PAM sequence: CTC
  source 1..20: mol_type = other DNA
gtgatccgccagccttggcc

SEQ ID NO: 14592 - DNA, 20 bp, synthetic construct
  misc_feature 1..20: note = Description of Artificial Sequence: Synthetic oligonucleotide
  misc_feature 1..20: note = Target: ANGPTL4; (-) strand; PAM type: YTN; PAM sequence: CTG
  source 1..20: mol_type = other DNA
acctcgtgatccgccagcct

SEQ ID NO: 14593 - DNA, 20 bp, synthetic construct
  misc_feature 1..20: note = Description of Artificial Sequence: Synthetic oligonucleotide
  misc_feature 1..20: note = Target: ANGPTL4; (-) strand; PAM type: YTN; PAM sequence: CTC
  source 1..20: mol_type = other DNA
ctgacctcgtgatccgccag

SEQ ID NO: 14594 - DNA, 20 bp, synthetic construct
  misc_feature 1..20: note = Description of Artificial Sequence: Synthetic oligonucleotide
  misc_feature 1..20: note = Target: ANGPTL4; (-) strand; PAM type: YTN; PAM sequence: CTC
  source 1..20: mol_type = other DNA
gatctcctgacctcgtgatc

SEQ ID NO: 14595 - DNA, 20 bp, synthetic construct
  misc_feature 1..20: note = Description of Artificial Sequence: Synthetic oligonucleotide
  misc_feature 1..20: note = Target: ANGPTL4; (-) strand; PAM type: YTN; PAM sequence: CTG
  source 1..20: mol_type = other DNA
gtctcgatctcctgacctcg

SEQ ID NO: 14596 - DNA, 20 bp, synthetic construct
  misc_feature 1..20: note = Description of Artificial Sequence: Synthetic oligonucleotide
  misc_feature 1..20: note = Target: ANGPTL4; (-) strand; PAM type: YTN; PAM sequence: TTG
  source 1..20: mol_type = other DNA
gccagactggtctcgatctc

SEQ ID NO: 14597 - DNA, 20 bp, synthetic construct
  misc_feature 1..20: note = Description of Artificial Sequence: Synthetic oligonucleotide
  misc_feature 1..20: note = Target: ANGPTL4; (-) strand; PAM type: YTN; PAM sequence: TTC
  source 1..20: mol_type = other DNA
accatgttggccagactggt

SEQ ID NO: 14598 - DNA, 20 bp, synthetic construct
  misc_feature 1..20: note = Description of Artificial Sequence: Synthetic oligonucleotide
  misc_feature 1..20: note = Target: ANGPTL4; (-) strand; PAM type: YTN; PAM sequence: TTT
  source 1..20: mol_type = other DNA
caccatgttggccagactgg

SEQ ID NO: 14599 - DNA, 20 bp, synthetic construct
  misc_feature 1..20: note = Description of Artificial Sequence: Synthetic oligonucleotide
  misc_feature 1..20: note = Target: ANGPTL4; (-) strand; PAM type: YTN; PAM sequence: TTG
  source 1..20: mol_type = other DNA
tagagacgggggtttcacca

SEQ ID NO: 14600 - DNA, 20 bp, synthetic construct
  misc_feature 1..20: note = Description of Artificial Sequence: Synthetic oligonucleotide
  misc_feature 1..20: note = Target: ANGPTL4; (-) strand; PAM type: YTN; PAM sequence: TTT
  source 1..20: mol_type = other DNA
gtagagacgggggtttcacc

SEQ ID NO: 14601 - DNA, 20 bp, synthetic construct
  misc_feature 1..20: note = Description of Artificial Sequence: Synthetic oligonucleotide
  misc_feature 1..20: note = Target: ANGPTL4; (-) strand; PAM type: YTN; PAM sequence: TTA
  source 1..20: mol_type = other DNA
tttgtagagacgggggtttc

SEQ ID NO: 14602 - DNA, 20 bp, synthetic construct
  misc_feature 1..20: note = Description of Artificial Sequence: Synthetic oligonucleotide
  misc_feature 1..20: note = Target: ANGPTL4; (-) strand; PAM type: YTN; PAM sequence: TTG
  source 1..20: mol_type = other DNA
cattatttgtagagacgggg

SEQ ID NO: 14603 - DNA, 20 bp, synthetic construct
  misc_feature 1..20: note = Description of Artificial Sequence: Synthetic oligonucleotide
  misc_feature 1..20: note = Target: ANGPTL4; (-) strand; PAM type: YTN; PAM sequence: TTT
  source 1..20: mol_type = other DNA
gcattatttgtagagacggg

SEQ ID NO: 14604 - DNA, 20 bp, synthetic construct
  misc_feature 1..20: note = Description of Artificial Sequence: Synthetic oligonucleotide
  misc_feature 1..20: note = Target: ANGPTL4; (-) strand; PAM type: YTN; PAM sequence: TTT
  source 1..20: mol_type = other DNA
tgcattatttgtagagacgg

SEQ ID NO: 14605 - DNA, 20 bp, synthetic construct
  misc_feature 1..20: note = Description of Artificial Sequence: Synthetic oligonucleotide
  misc_feature 1..20: note = Target: ANGPTL4; (-) strand; PAM type: YTN; PAM sequence: TTT
  source 1..20: mol_type = other DNA
ttgcattatttgtagagacg

SEQ ID NO: 14606 - DNA, 20 bp, synthetic construct
  misc_feature 1..20: note = Description of Artificial Sequence: Synthetic oligonucleotide
  misc_feature 1..20: note = Target: ANGPTL4; (-) strand; PAM type: YTN; PAM sequence: CTA
  source 1..20: mol_type = other DNA
gtttttgcattatttgtaga

SEQ ID NO: 14607 - DNA, 20 bp, synthetic construct
  misc_feature 1..20: note = Description of Artificial Sequence: Synthetic oligonucleotide
  misc_feature 1..20: note = Target: ANGPTL4; (-) strand; PAM type: YTN; PAM sequence: CTA
  source 1..20: mol_type = other DNA
caggcatgtgccaccacgcc

SEQ ID NO: 14608 - DNA, 20 bp, synthetic construct
  misc_feature 1..20: note = Description of Artificial Sequence: Synthetic oligonucleotide
  misc_feature 1..20: note = Target: ANGPTL4; (-) strand; PAM type: YTN; PAM sequence: CTG
  source 1..20: mol_type = other DNA
ggactacaggcatgtgccac

SEQ ID NO: 14609 - DNA, 20 bp, synthetic construct
  misc_feature 1..20: note = Description of Artificial Sequence: Synthetic oligonucleotide
  misc_feature 1..20: note = Target: ANGPTL4; (-) strand; PAM type: YTN; PAM sequence: CTC
  source 1..20: mol_type = other DNA
cggagcagctgggactacag

SEQ ID NO: 14610 - DNA, 20 bp, synthetic construct
  misc_feature 1..20: note = Description of Artificial Sequence: Synthetic oligonucleotide
  misc_feature 1..20: note = Target: ANGPTL4; (-) strand; PAM type: YTN; PAM sequence: CTG
  source 1..20: mol_type = other DNA
ccgcagcctccggagcagct

SEQ ID NO: 14611 - DNA, 20 bp, synthetic construct
  misc_feature 1..20: note = Description of Artificial Sequence: Synthetic oligonucleotide
  misc_feature 1..20: note = Target: ANGPTL4; (-) strand; PAM type: YTN; PAM sequence: TTC
  source 1..20: mol_type = other DNA
tgccgcagcctccggagcag

SEQ ID NO: 14612 - DNA, 20 bp, synthetic construct
  misc_feature 1..20: note = Description of Artificial Sequence: Synthetic oligonucleotide
  misc_feature 1..20: note = Target: ANGPTL4; (-) strand; PAM type: YTN; PAM sequence: TTC
  source 1..20: mol_type = other DNA
aagcaattctgccgcagcct

SEQ ID NO: 14613 - DNA, 20 bp, synthetic construct
  misc_feature 1..20: note = Description of Artificial Sequence: Synthetic oligonucleotide
  misc_feature 1..20: note = Target: ANGPTL4; (-) strand; PAM type: YTN; PAM sequence: CTC
  source 1..20: mol_type = other DNA
ccaggttcaagcaattctgc

SEQ ID NO: 14614 - DNA, 20 bp, synthetic construct
  misc_feature 1..20: note = Description of Artificial Sequence: Synthetic oligonucleotide
  misc_feature 1..20: note = Target: ANGPTL4; (-) strand; PAM type: YTN; PAM sequence: CTC
  source 1..20: mol_type = other DNA
cgcctcccaggttcaagcaa

SEQ ID NO: 14615 - DNA, 20 bp, synthetic construct
  misc_feature 1..20: note = Description of Artificial Sequence: Synthetic oligonucleotide
  misc_feature 1..20: note = Target: ANGPTL4; (-) strand; PAM type: YTN; PAM sequence: CTG
  source 1..20: mol_type = other DNA
caacctccgcctcccaggtt

SEQ ID NO: 14616 - DNA, 20 bp, synthetic construct
  misc_feature 1..20: note = Description of Artificial Sequence: Synthetic oligonucleotide
  misc_feature 1..20: note = Target: ANGPTL4; (-) strand; PAM type: YTN; PAM sequence: CTC
  source 1..20: mol_type = other DNA
actgcaacctccgcctccca

SEQ ID NO: 14617 - DNA, 20 bp, synthetic construct
  misc_feature 1..20: note = Description of Artificial Sequence: Synthetic oligonucleotide
  misc_feature 1..20: note = Target: ANGPTL4; (-) strand; PAM type: YTN; PAM sequence: TTG
  source 1..20: mol_type = other DNA
gctcactgcaacctccgcct

SEQ ID NO: 14618 - DNA, 20 bp, synthetic construct
  misc_feature 1..20: note = Description of Artificial Sequence: Synthetic oligonucleotide
  misc_feature 1..20: note = Target: ANGPTL4; (-) strand; PAM type: YTN; PAM sequence: CTT
  source 1..20: mol_type = other DNA
ggctcactgcaacctccgcc

SEQ ID NO: 14619 - DNA, 20 bp, synthetic construct
  misc_feature 1..20: note = Description of Artificial Sequence: Synthetic oligonucleotide
  misc_feature 1..20: note = Target: ANGPTL4; (-) strand; PAM type: YTN; PAM sequence: CTG
  source 1..20: mol_type = other DNA
gagtgcagtggcgcaatctt

SEQ ID NO: 14620 - DNA, 20 bp, synthetic construct
  misc_feature 1..20: note = Description of Artificial Sequence: Synthetic oligonucleotide
  misc_feature 1..20: note = Target: ANGPTL4; (-) strand; PAM type: YTN; PAM sequence: CTG
  source 1..20: mol_type = other DNA
tcgccaggctggagtgcagt

SEQ ID NO: 14621 - DNA, 20 bp, synthetic construct
  misc_feature 1..20: note = Description of Artificial Sequence: Synthetic oligonucleotide
  misc_feature 1..20: note = Target: ANGPTL4; (-) strand; PAM type: YTN; PAM sequence: CTC
  source 1..20: mol_type = other DNA
tgtcgccaggctggagtgca

SEQ ID NO: 14622 - DNA, 20 bp, synthetic construct
  misc_feature 1..20: note = Description of Artificial Sequence: Synthetic oligonucleotide
  misc_feature 1..20: note = Target: ANGPTL4; (-) strand; PAM type: YTN; PAM sequence: CTC
  source 1..20: mol_type = other DNA
gctctgtcgccaggctggag

SEQ ID NO: 14623 - DNA, 20 bp, synthetic construct
  misc_feature 1..20: note = Description of Artificial Sequence: Synthetic oligonucleotide
  misc_feature 1..20: note = Target: ANGPTL4; (-) strand; PAM type: YTN; PAM sequence: TTG
  source 1..20: mol_type = other DNA
atacggagtctcgctctgtc

SEQ ID NO: 14624 - DNA, 20 bp, synthetic construct
  misc_feature 1..20: note = Description of Artificial Sequence: Synthetic oligonucleotide
  misc_feature 1..20: note = Target: ANGPTL4; (-) strand; PAM type: YTN; PAM sequence: TTT
  source 1..20: mol_type = other DNA
gatacggagtctcgctctgt

SEQ ID NO: 14625 - DNA, 20 bp, synthetic construct
  misc_feature 1..20: note = Description of Artificial Sequence: Synthetic oligonucleotide
  misc_feature 1..20: note = Target: ANGPTL4; (-) strand; PAM type: YTN; PAM sequence: TTT
  source 1..20: mol_type = other DNA
tgatacggagtctcgctctg

SEQ ID NO: 14626 - DNA, 20 bp, synthetic construct
  misc_feature 1..20: note = Description of Artificial Sequence: Synthetic oligonucleotide
  misc_feature 1..20: note = Target: ANGPTL4; (-) strand; PAM type: YTN; PAM sequence: TTT
  source 1..20: mol_type = other DNA
ttgatacggagtctcgctct

SEQ ID NO: 14627 - DNA, 20 bp, synthetic construct
  misc_feature 1..20: note = Description of Artificial Sequence: Synthetic oligonucleotide
  misc_feature 1..20: note = Target: ANGPTL4; (-) strand; PAM type: YTN; PAM sequence: TTT
  source 1..20: mol_type = other DNA
tttgatacggagtctcgctc

SEQ ID NO: 14628 - DNA, 20 bp, synthetic construct
  misc_feature 1..20: note = Description of Artificial Sequence: Synthetic oligonucleotide
  misc_feature 1..20: note = Target: ANGPTL4; (-) strand; PAM type: YTN; PAM sequence: TTG
  source 1..20: mol_type = other DNA
ttttttgatacggagtctcg

SEQ ID NO: 14629 - DNA, 20 bp, synthetic construct
  misc_feature 1..20: note = Description of Artificial Sequence: Synthetic oligonucleotide
  misc_feature 1..20: note = Target: ANGPTL4; (-) strand; PAM type: YTN; PAM sequence: TTT
  source 1..20: mol_type = other DNA
gttttttgatacggagtctc

SEQ ID NO: 14630 - DNA, 20 bp, synthetic construct
  misc_feature 1..20: note = Description of Artificial Sequence: Synthetic oligonucleotide
  misc_feature 1..20: note = Target: ANGPTL4; (-) strand; PAM type: YTN; PAM sequence: TTT
  source 1..20: mol_type = other DNA
tgttttttgatacggagtct

SEQ ID NO: 14631 - DNA, 20 bp, synthetic construct
  misc_feature 1..20: note = Description of Artificial Sequence: Synthetic oligonucleotide
  misc_feature 1..20: note = Target: ANGPTL4; (-) strand; PAM type: YTN; PAM sequence: TTG
  source 1..20: mol_type = other DNA
ttttgttttttgatacggag

SEQ ID NO: 14632 - DNA, 20 bp, synthetic construct
  misc_feature 1..20: note = Description of Artificial Sequence: Synthetic oligonucleotide
  misc_feature 1..20: note = Target: ANGPTL4; (-) strand; PAM type: YTN; PAM sequence: TTT
  source 1..20: mol_type = other DNA
gttttgttttttgatacgga

SEQ ID NO: 14633 - DNA, 20 bp, synthetic construct
  misc_feature 1..20: note = Description of Artificial Sequence: Synthetic oligonucleotide
  misc_feature 1..20: note = Target: ANGPTL4; (-) strand; PAM type: YTN; PAM sequence: TTT
  source 1..20: mol_type = other DNA
tgttttgttttttgatacgg

SEQ ID NO: 14634 - DNA, 20 bp, synthetic construct
  misc_feature 1..20: note = Description of Artificial Sequence: Synthetic oligonucleotide
  misc_feature 1..20: note = Target: ANGPTL4; (-) strand; PAM type: YTN; PAM sequence: TTT
  source 1..20: mol_type = other DNA
ttgttttgttttttgatacg

SEQ ID NO: 14635 - DNA, 20 bp, synthetic construct
  misc_feature 1..20: note = Description of Artificial Sequence: Synthetic oligonucleotide
  misc_feature 1..20: note = Target: ANGPTL4; (-) strand; PAM type: YTN; PAM sequence: TTT
  source 1..20: mol_type = other DNA
tttgttttgttttttgatac

SEQ ID NO: 14636 - DNA, 20 bp, synthetic construct
  misc_feature 1..20: note = Description of Artificial Sequence: Synthetic oligonucleotide
  misc_feature 1..20: note = Target: ANGPTL4; (-) strand; PAM type: YTN; PAM sequence: TTT
  source 1..20: mol_type = other DNA
ttttgttttgttttttgata

SEQ ID NO: 14637 - DNA, 20 bp, synthetic construct
  misc_feature 1..20: note = Description of Artificial Sequence: Synthetic oligonucleotide
  misc_feature 1..20: note = Target: ANGPTL4; (-) strand; PAM type: YTN; PAM sequence: CTT
  source 1..20: mol_type = other DNA
tttttgttttgttttttgat

SEQ ID NO: 14638 - DNA, 20 bp, synthetic construct
  misc_feature 1..20: note = Description of Artificial Sequence: Synthetic oligonucleotide
  misc_feature 1..20: note = Target: ANGPTL4; (-) strand; PAM type: YTN; PAM sequence: CTC
  source 1..20: mol_type = other DNA
tttttttgttttgttttttg

SEQ ID NO: 14639 - DNA, 20 bp, synthetic construct
  misc_feature 1..20: note = Description of Artificial Sequence: Synthetic oligonucleotide
  misc_feature 1..20: note = Target: ANGPTL4; (-) strand; PAM type: YTN; PAM sequence: CTC
  source 1..20: mol_type = other DNA
tctttttttgttttgttttt

SEQ ID NO: 14640 - DNA, 20 bp, synthetic construct
  misc_feature 1..20: note = Description of Artificial Sequence: Synthetic oligonucleotide
  misc_feature 1..20: note = Target: ANGPTL4; (-) strand; PAM type: YTN; PAM sequence: CTG
  source 1..20: mol_type = other DNA
ggactctctttttttgtttt

SEQ ID NO: 14641 - DNA, 20 bp, synthetic construct
  misc_feature 1..20: note = Description of Artificial Sequence: Synthetic oligonucleotide
  misc_feature 1..20: note = Target: ANGPTL4; (-) strand; PAM type: YTN; PAM sequence: CTG
  source 1..20: mol_type = other DNA
cctgggactctctttttttg

SEQ ID NO: 14642 - DNA, 20 bp, synthetic construct
  misc_feature 1..20: note = Description of Artificial Sequence: Synthetic oligonucleotide
  misc_feature 1..20: note = Target: ANGPTL4; (-) strand; PAM type: YTN; PAM sequence: TTC
  source 1..20: mol_type = other DNA
cccctgcctgggactctctt

SEQ ID NO: 14643 - DNA, 20 bp, synthetic construct
  misc_feature 1..20: note = Description of Artificial Sequence: Synthetic oligonucleotide
  misc_feature 1..20: note = Target: ANGPTL4; (-) strand; PAM type: YTN; PAM sequence: CTG
  source 1..20: mol_type = other DNA
ttccccctgcctgggactct

SEQ ID NO: 14644 - DNA, 20 bp, synthetic construct
  misc_feature 1..20: note = Description of Artificial Sequence: Synthetic oligonucleotide
  misc_feature 1..20: note = Target: ANGPTL4; (-) strand; PAM type: YTN; PAM sequence: TTG
  source 1..20: mol_type = other DNA
cacatgctgttccccctgcc

SEQ ID NO: 14645 - DNA, 20 bp, synthetic construct
  misc_feature 1..20: note = Description of Artificial Sequence: Synthetic oligonucleotide
  misc_feature 1..20: note = Target: ANGPTL4; (-) strand; PAM type: YTN; PAM sequence: TTT
  source 1..20: mol_type = other DNA
gcacatgctgttccccctgc

SEQ ID NO: 14646 - DNA, 20 bp, synthetic construct
  misc_feature 1..20: note = Description of Artificial Sequence: Synthetic oligonucleotide
  misc_feature 1..20: note = Target: ANGPTL4; (-) strand; PAM type: YTN; PAM sequence: CTT
  source 1..20: mol_type = other DNA
tgcacatgctgttccccctg

SEQ ID NO: 14647 - DNA, 20 bp, synthetic construct
  misc_feature 1..20: note = Description of Artificial Sequence: Synthetic oligonucleotide
  misc_feature 1..20: note = Target: ANGPTL4; (-) strand; PAM type: YTN; PAM sequence: CTG
  source 1..20: mol_type = other DNA
ccacagggactttgcacatg

SEQ ID NO: 14648 - DNA, 20 bp, synthetic construct
  misc_feature 1..20: note = Description of Artificial Sequence: Synthetic oligonucleotide
  misc_feature 1..20: note = Target: ANGPTL4; (-) strand; PAM type: YTN; PAM sequence: TTG
  source 1..20: mol_type = other DNA
taccacacaccgtcctgcca

SEQ ID NO: 14649 - DNA, 20 bp, synthetic construct
  misc_feature 1..20: note = Description of Artificial Sequence: Synthetic oligonucleotide
  misc_feature 1..20: note = Target: ANGPTL4; (-) strand; PAM type: YTN; PAM sequence: CTT
  source 1..20: mol_type = other DNA
gtaccacacaccgtcctgcc

SEQ ID NO: 14650 - DNA, 20 bp, synthetic construct
  misc_feature 1..20: note = Description of Artificial Sequence: Synthetic oligonucleotide
  misc_feature 1..20: note = Target: ANGPTL4; (-) strand; PAM type: YTN; PAM sequence: TTC
  source 1..20: mol_type = other DNA
ccacccttgtaccacacacc

SEQ ID NO: 14651 - DNA, 20 bp, synthetic construct
  misc_feature 1..20: note = Description of Artificial Sequence: Synthetic oligonucleotide
  misc_feature 1..20: note = Target: ANGPTL4; (-) strand; PAM type: YTN; PAM sequence: CTT
  source 1..20: mol_type = other DNA
cccacccttgtaccacacac

SEQ ID NO: 14652 - DNA, 20 bp, synthetic construct
  misc_feature 1..20: note = Description of Artificial Sequence: Synthetic oligonucleotide
  misc_feature 1..20: note = Target: ANGPTL4; (-) strand; PAM type: YTN; PAM sequence: TTC
  source 1..20: mol_type = other DNA
ttcccacccttgtaccacac

SEQ ID NO: 14653 - DNA, 20 bp, synthetic construct
  misc_feature 1..20: note = Description of Artificial Sequence: Synthetic oligonucleotide
  misc_feature 1..20: note = Target: ANGPTL4; (-) strand; PAM type: YTN; PAM sequence: TTT
  source 1..20: mol_type = other DNA
cttcccacccttgtaccaca

SEQ ID NO: 14654 - DNA, 20 bp, synthetic construct
  misc_feature 1..20: note = Description of Artificial Sequence: Synthetic oligonucleotide
  misc_feature 1..20: note = Target: ANGPTL4; (-) strand; PAM type: YTN; PAM sequence: CTT
  source 1..20: mol_type = other DNA
tcttcccacccttgtaccac

SEQ ID NO: 14655 - DNA, 20 bp, synthetic construct
  misc_feature 1..20: note = Description of Artificial Sequence: Synthetic oligonucleotide
  misc_feature 1..20: note = Target: ANGPTL4; (-) strand; PAM type: YTN; PAM sequence: CTG
  source 1..20: mol_type = other DNA
gcacacaggctttcttccca

SEQ ID NO: 14656 - DNA, 20 bp, synthetic construct
  misc_feature 1..20: note = Description of Artificial Sequence: Synthetic oligonucleotide
  misc_feature 1..20: note = Target: ANGPTL4; (-) strand; PAM type: YTN; PAM sequence: CTC
  source 1..20: mol_type = other DNA
tggcacacaggctttcttcc

SEQ ID NO: 14657 - DNA, 20 bp, synthetic construct
  misc_feature 1..20: note = Description of Artificial Sequence: Synthetic oligonucleotide
  misc_feature 1..20: note = Target: ANGPTL4; (-) strand; PAM type: YTN; PAM sequence: CTC
  source 1..20: mol_type = other DNA
tctggcacacaggctttctt

SEQ ID NO: 14658 - DNA, 20 bp, synthetic construct
  misc_feature 1..20: note = Description of Artificial Sequence: Synthetic oligonucleotide
  misc_feature 1..20: note = Target: ANGPTL4; (-) strand; PAM type: YTN; PAM sequence: CTG
  source 1..20: mol_type = other DNA
tacccacaccctctctggca

SEQ ID NO: 14659 - DNA, 20 bp, synthetic construct
  misc_feature 1..20: note = Description of Artificial Sequence: Synthetic oligonucleotide
  misc_feature 1..20: note = Target: ANGPTL4; (-) strand; PAM type: YTN; PAM sequence: CTG
  source 1..20: mol_type = other DNA
ccatgctgtacccacaccct

SEQ ID NO: 14660 - DNA, 20 bp, synthetic construct
  misc_feature 1..20: note = Description of Artificial Sequence: Synthetic oligonucleotide
  misc_feature 1..20: note = Target: ANGPTL4; (-) strand; PAM type: YTN; PAM sequence: CTC
  source 1..20: mol_type = other DNA
ctgccatgctgtacccacac

SEQ ID NO: 14661 - DNA, 20 bp, synthetic construct
  misc_feature 1..20: note = Description of Artificial Sequence: Synthetic oligonucleotide
  misc_feature 1..20: note = Target: ANGPTL4; (-) strand; PAM type: YTN; PAM sequence: CTC
  source 1..20: mol_type = other DNA
ctcctgccatgctgtaccca

SEQ ID NO: 14662 - DNA, 20 bp, synthetic construct
  misc_feature 1..20: note = Description of Artificial Sequence: Synthetic oligonucleotide
  misc_feature 1..20: note = Target: ANGPTL4; (-) strand; PAM type: YTN; PAM sequence: CTG
  source 1..20: mol_type = other DNA
gaggaccagcccccgtgccc

SEQ ID NO: 14663 - DNA, 20 bp, synthetic construct
  misc_feature 1..20: note = Description of Artificial Sequence: Synthetic oligonucleotide
  misc_feature 1..20: note = Target: ANGPTL4; (-) strand; PAM type: YTN; PAM sequence: CTC
  source 1..20: mol_type = other DNA
agcatggtccacaaggcacc

SEQ ID NO: 14664 - DNA, 20 bp, synthetic construct
  misc_feature 1..20: note = Description of Artificial Sequence: Synthetic oligonucleotide
  misc_feature 1..20: note = Target: ANGPTL4; (-) strand; PAM type: YTN; PAM sequence: TTC
  source 1..20: mol_type = other DNA
ctcagcatggtccacaaggc

SEQ ID NO: 14665 - DNA, 20 bp, synthetic construct
  misc_feature 1..20: note = Description of Artificial Sequence: Synthetic oligonucleotide
  misc_feature 1..20: note = Target: ANGPTL4; (-) strand; PAM type: YTN; PAM sequence: CTT
  source 1..20: mol_type = other DNA
cctcagcatggtccacaagg

SEQ ID NO: 14666 - DNA, 20 bp, synthetic construct
  misc_feature 1..20: note = Description of Artificial Sequence: Synthetic oligonucleotide
  misc_feature 1..20: note = Target: ANGPTL4; (-) strand; PAM type: YTN; PAM sequence: CTA
  source 1..20: mol_type = other DNA
tgtccttcctcagcatggtc

SEQ ID NO: 14667 - DNA, 20 bp, synthetic construct
  misc_feature 1..20: note = Description of Artificial Sequence: Synthetic oligonucleotide
  misc_feature 1..20: note = Target: ANGPTL4; (-) strand; PAM type: YTN; PAM sequence: CTC
  source 1..20: mol_type = other DNA
cctatgtccttcctcagcat

SEQ ID NO: 14668 - DNA, 20 bp, synthetic construct
  misc_feature 1..20: note = Description of Artificial Sequence: Synthetic oligonucleotide
  misc_feature 1..20: note = Target: ANGPTL4; (-) strand; PAM type: YTN; PAM sequence: TTC
  source 1..20: mol_type = other DNA
catggctccctatgtccttc

SEQ ID NO: 14669 - DNA, 20 bp, synthetic construct
  misc_feature 1..20: note = Description of Artificial Sequence: Synthetic oligonucleotide
  misc_feature 1..20: note = Target: ANGPTL4; (-) strand; PAM type: YTN; PAM sequence: CTT
  source 1..20: mol_type = other DNA
ccatggctccctatgtcctt

SEQ ID NO: 14670 - DNA, 20 bp, synthetic construct
  misc_feature 1..20: note = Description of Artificial Sequence: Synthetic oligonucleotide
  misc_feature 1..20: note = Target: ANGPTL4; (-) strand; PAM type: YTN; PAM sequence: CTC
  source 1..20: mol_type = other DNA
ttccatggctccctatgtcc

SEQ ID NO: 14671 - DNA, 20 bp, synthetic construct
  misc_feature 1..20: note = Description of Artificial Sequence: Synthetic oligonucleotide
  misc_feature 1..20: note = Target: ANGPTL4; (-) strand; PAM type: YTN; PAM sequence: CTA
  source 1..20: mol_type = other DNA
acctcttccatggctcccta

SEQ ID NO: 14672 - DNA, 20 bp, synthetic construct
  misc_feature 1..20: note = Description of Artificial Sequence: Synthetic oligonucleotide
  misc_feature 1..20: note = Target: ANGPTL4; (-) strand; PAM type: YTN; PAM sequence: CTG
  source 1..20: mol_type = other DNA
cctaacctcttccatggctc

SEQ ID NO: 14673 - DNA, 20 bp, synthetic construct
  misc_feature 1..20: note = Description of Artificial Sequence: Synthetic oligonucleotide
  misc_feature 1..20: note = Target: ANGPTL4; (-) strand; PAM type: YTN; PAM sequence: CTG
  source 1..20: mol_type = other DNA
ccatctgcctaacctcttcc

SEQ ID NO: 14674 - DNA, 20 bp, synthetic construct
  misc_feature 1..20: note = Description of Artificial Sequence: Synthetic oligonucleotide
  misc_feature 1..20: note = Target: ANGPTL4; (-) strand; PAM type: YTN; PAM sequence: CTC
  source 1..20: mol_type = other DNA
tgccatctgcctaacctctt

SEQ ID NO: 14675 - DNA, 20 bp, synthetic construct
  misc_feature 1..20: note = Description of Artificial Sequence: Synthetic oligonucleotide
  misc_feature 1..20: note = Target: ANGPTL4; (-) strand; PAM type: YTN; PAM sequence: CTC
  source 1..20: mol_type = other DNA
tctgccatctgcctaacctc

SEQ ID NO: 14676 - DNA, 20 bp, synthetic construct
  misc_feature 1..20: note = Description of Artificial Sequence: Synthetic oligonucleotide
  misc_feature 1..20: note = Target: ANGPTL4; (-) strand; PAM type: YTN; PAM sequence: CTC
  source 1..20: mol_type = other DNA
atgaccacctctctgccatc

SEQ ID NO: 14677 - DNA, 20 bp, synthetic construct
  misc_feature 1..20: note = Description of Artificial Sequence: Synthetic oligonucleotide
  misc_feature 1..20: note = Target: ANGPTL4; (-) strand; PAM type: YTN; PAM sequence: TTA
  source 1..20: mol_type = other DNA
tctcatgaccacctctctgc

SEQ ID NO: 14678 - DNA, 20 bp, synthetic construct
  misc_feature 1..20: note = Description of Artificial Sequence: Synthetic oligonucleotide
  misc_feature 1..20: note = Target: ANGPTL4; (-) strand; PAM type: YTN; PAM sequence: CTT
  source 1..20: mol_type = other DNA
atctcatgaccacctctctg

SEQ ID NO: 14679 - DNA, 20 bp, synthetic construct
  misc_feature 1..20: note = Description of Artificial Sequence: Synthetic oligonucleotide
  misc_feature 1..20: note = Target: ANGPTL4; (-) strand; PAM type: YTN; PAM sequence: TTA
  source 1..20: mol_type = other DNA
acagtggatgaccagggaag

SEQ ID NO: 14680 - DNA, 20 bp, synthetic construct
  misc_feature 1..20: note = Description of Artificial Sequence: Synthetic oligonucleotide
  misc_feature 1..20: note = Target: ANGPTL4; (-) strand; PAM type: YTN; PAM sequence: CTT
  source 1..20: mol_type = other DNA
aacagtggatgaccagggaa

SEQ ID NO: 14681 - DNA, 20 bp, synthetic construct
  misc_feature 1..20: note = Description of Artificial Sequence: Synthetic oligonucleotide
  misc_feature 1..20: note = Target: ANGPTL4; (-) strand; PAM type: YTN; PAM sequence: CTG
  source 1..20: mol_type = other DNA
ggggcttaacagtggatgac

SEQ ID NO: 14682 - DNA, 20 bp, synthetic construct
  misc_feature 1..20: note = Description of Artificial Sequence: Synthetic oligonucleotide
  misc_feature 1..20: note = Target: ANGPTL4; (-) strand; PAM type: YTN; PAM sequence: CTC
  source 1..20: mol_type = other DNA
aggagccaggcatatctggg

SEQ ID NO: 14683 - DNA, 20 bp, synthetic construct
  misc_feature 1..20: note = Description of Artificial Sequence: Synthetic oligonucleotide
  misc_feature 1..20: note = Target: ANGPTL4; (-) strand; PAM type: YTN; PAM sequence: CTG
  source 1..20: mol_type = other DNA
gggggggtctcaggagccag

SEQ ID NO: 14684 - DNA, 20 bp, synthetic construct
  misc_feature 1..20: note = Description of Artificial Sequence: Synthetic oligonucleotide
  misc_feature 1..20: note = Target: ANGPTL4; (-) strand; PAM type: YTN; PAM sequence: TTG
  source 1..20: mol_type = other DNA
aaacaggagggcagcccctg

SEQ ID NO: 14685 - DNA, 20 bp, synthetic construct
  misc_feature 1..20: note = Description of Artificial Sequence: Synthetic oligonucleotide
  misc_feature 1..20: note = Target: ANGPTL4; (-) strand; PAM type: YTN; PAM sequence: CTT
  source 1..20: mol_type = other DNA
gaaacaggagggcagcccct

SEQ ID NO: 14686 - DNA, 20 bp, synthetic construct
  misc_feature 1..20: note = Description of Artificial Sequence: Synthetic oligonucleotide
  misc_feature 1..20: note = Target: ANGPTL4; (-) strand; PAM type: YTN; PAM sequence: CTG
  source 1..20: mol_type = other DNA
aagggagataaagtggagac

SEQ ID NO: 14687 - DNA, 20 bp, synthetic construct
  misc_feature 1..20: note = Description of Artificial Sequence: Synthetic oligonucleotide
  misc_feature 1..20: note = Target: ANGPTL4; (-) strand; PAM type: YTN; PAM sequence: CTG
  source 1..20: mol_type = other DNA
ggcagccctgaagggagata

SEQ ID NO: 14688 - DNA, 20 bp, synthetic construct
  misc_feature 1..20: note = Description of Artificial Sequence: Synthetic oligonucleotide
  misc_feature 1..20: note = Target: ANGPTL4; (-) strand; PAM type: YTN; PAM sequence: CTG
  source 1..20: mol_type = other DNA
gcaatccctgggcagccctg

SEQ ID NO: 14689 - DNA, 20 bp, synthetic construct
  misc_feature 1..20: note = Description of Artificial Sequence: Synthetic oligonucleotide
  misc_feature 1..20: note = Target: ANGPTL4; (-) strand; PAM type: YTN; PAM sequence: CTC
  source 1..20: mol_type = other DNA
ctggcaatccctgggcagcc

SEQ ID NO: 14690 - DNA, 20 bp, synthetic construct
  misc_feature 1..20: note = Description of Artificial Sequence: Synthetic oligonucleotide
  misc_feature 1..20: note = Target: ANGPTL4; (-) strand; PAM type: YTN; PAM sequence: CTG
  source 1..20: mol_type = other DNA
gaacagctcctggcaatccc

SEQ ID NO: 14691 - DNA, 20 bp, synthetic construct
  misc_feature 1..20: note = Description of Artificial Sequence: Synthetic oligonucleotide
  misc_feature 1..20: note = Target: ANGPTL4; (-) strand; PAM type: YTN; PAM sequence: CTC
  source 1..20: mol_type = other DNA
cccaacctggaacagctcct

SEQ ID NO: 14692 - DNA, 20 bp, synthetic construct
  misc_feature 1..20: note = Description of Artificial Sequence: Synthetic oligonucleotide
  misc_feature 1..20: note = Target: ANGPTL4; (-) strand; PAM type: YTN; PAM sequence: CTC
  source 1..20: mol_type = other DNA
tccccaacctggaacagctc

SEQ ID NO: 14693 - DNA, 20 bp, synthetic construct
  misc_feature 1..20: note = Description of Artificial Sequence: Synthetic oligonucleotide
  misc_feature 1..20: note = Target: ANGPTL4; (-) strand; PAM type: YTN; PAM sequence: CTG
  source 1..20: mol_type = other DNA
cctctccccaacctggaaca

SEQ ID NO: 14694 - DNA, 20 bp, synthetic construct
  misc_feature 1..20: note = Description of Artificial Sequence: Synthetic oligonucleotide
  misc_feature 1..20: note = Target: ANGPTL4; (-) strand; PAM type: YTN; PAM sequence: CTC
  source 1..20: mol_type = other DNA
tgcctctccccaacctggaa

SEQ ID NO: 14695 - DNA, 20 bp, synthetic construct
  misc_feature 1..20: note = Description of Artificial Sequence: Synthetic oligonucleotide
  misc_feature 1..20: note = Target: ANGPTL4; (-) strand; PAM type: YTN; PAM sequence: TTC
  source 1..20: mol_type = other DNA
aaatagtccactctgcctct

SEQ ID NO: 14696 - DNA, 20 bp, synthetic construct
  misc_feature 1..20: note = Description of Artificial Sequence: Synthetic oligonucleotide
  misc_feature 1..20: note = Target: ANGPTL4; (-) strand; PAM type: YTN; PAM sequence: TTT
  source 1..20: mol_type = other DNA
caaatagtccactctgcctc

SEQ ID NO: 14697 - DNA, 20 bp, synthetic construct
  misc_feature 1..20: note = Description of Artificial Sequence: Synthetic oligonucleotide
  misc_feature 1..20: note = Target: ANGPTL4; (-) strand; PAM type: YTN; PAM sequence: CTG
  source 1..20: mol_type = other DNA
gatttcaaatagtccactct

SEQ ID NO: 14698 - DNA, 20 bp, synthetic construct
  misc_feature 1..20: note = Description of Artificial Sequence: Synthetic oligonucleotide
  misc_feature 1..20: note = Target: ANGPTL4; (-) strand; PAM type: YTN; PAM sequence: CTG
  source 1..20: mol_type = other DNA
aggctggatttcaaatagtc

SEQ ID NO: 14699 - DNA, 20 bp, synthetic construct
  misc_feature 1..20: note = Description of Artificial Sequence: Synthetic oligonucleotide
  misc_feature 1..20: note = Target: ANGPTL4; (-) strand; PAM type: YTN; PAM sequence: TTC
  source 1..20: mol_type = other DNA
accaaaaatggcggagaccc

SEQ ID NO: 14700 - DNA, 20 bp, synthetic construct
  misc_feature 1..20: note = Description of Artificial Sequence: Synthetic oligonucleotide
  misc_feature 1..20: note = Target: ANGPTL4; (-) strand; PAM type: YTN; PAM sequence: TTG
  source 1..20: mol_type = other DNA
cagttcaccaaaaatggcgg

SEQ ID NO: 14701 - DNA, 20 bp, synthetic construct
  misc_feature 1..20: note = Description of Artificial Sequence: Synthetic oligonucleotide
  misc_feature 1..20: note = Target: ANGPTL4; (-) strand; PAM type: YTN; PAM sequence: CTT
  source 1..20: mol_type = other DNA
gcagttcaccaaaaatggcg

SEQ ID NO: 14702 - DNA, 20 bp, synthetic construct
  misc_feature 1..20: note = Description of Artificial Sequence: Synthetic oligonucleotide
  misc_feature 1..20: note = Target: ANGPTL4; (-) strand; PAM type: YTN; PAM sequence: CTG
  source 1..20: mol_type = other DNA
aggtcatcttgcagttcacc

SEQ ID NO: 14703 - DNA, 20 bp, synthetic construct
  misc_feature 1..20: note = Description of Artificial Sequence: Synthetic oligonucleotide
  misc_feature 1..20: note = Target: ANGPTL4; (-) strand; PAM type: YTN; PAM sequence: CTA
  source 1..20: mol_type = other DNA
cctgaggtcatcttgcagtt

SEQ ID NO: 14704 - DNA, 20 bp, synthetic construct
  misc_feature 1..20: note = Description of Artificial Sequence: Synthetic oligonucleotide
  misc_feature 1..20: note = Target: ANGPTL4; (-) strand; PAM type: YTN; PAM sequence: CTA
  source 1..20: mol_type = other DNA
acacaccctacctgaggtca

SEQ ID NO: 14705 - DNA, 20 bp, synthetic construct
  misc_feature 1..20: note = Description of Artificial Sequence: Synthetic oligonucleotide
  misc_feature 1..20: note = Target: ANGPTL4; (-) strand; PAM type: YTN; PAM sequence: CTG
  source 1..20: mol_type = other DNA
gtggactaacacaccctacc

SEQ ID NO: 14706 - DNA, 20 bp, synthetic construct
  misc_feature 1..20: note = Description of Artificial Sequence: Synthetic oligonucleotide
  misc_feature 1..20: note = Target: ANGPTL4; (-) strand; PAM type: YTN; PAM sequence: CTA
  source 1..20: mol_type = other DNA
tggggagaggggcccctggt

SEQ ID NO: 14707 - DNA, 20 bp, synthetic construct
  misc_feature 1..20: note = Description of Artificial Sequence: Synthetic oligonucleotide
  misc_feature 1..20: note = Target: ANGPTL4; (-) strand; PAM type: YTN; PAM sequence: TTA
  source 1..20: mol_type = other DNA
aagaaagacaacagggccta

SEQ ID NO: 14708 - DNA, 20 bp, synthetic construct
  misc_feature 1..20: note = Description of Artificial Sequence: Synthetic oligonucleotide
  misc_feature 1..20: note = Target: ANGPTL4; (-) strand; PAM type: YTN; PAM sequence: TTT
  source 1..20: mol_type = other DNA
aaagaaagacaacagggcct

SEQ ID NO: 14709 - DNA, 20 bp, synthetic construct
  misc_feature 1..20: note = Description of Artificial Sequence: Synthetic oligonucleotide
  misc_feature 1..20: note = Target: ANGPTL4; (-) strand; PAM type: YTN; PAM sequence: TTC
  source 1..20: mol_type = other DNA
aatttaaagaaagacaacag

SEQ ID NO: 14710 - DNA, 20 bp, synthetic construct
  misc_feature 1..20: note = Description of Artificial Sequence: Synthetic oligonucleotide
  misc_feature 1..20: note = Target: ANGPTL4; (-) strand; PAM type: YTN; PAM sequence: TTT
  source 1..20: mol_type = other DNA
caatttaaagaaagacaaca

SEQ ID NO: 14711 - DNA, 20 bp, synthetic construct
  misc_feature 1..20: note = Description of Artificial Sequence: Synthetic oligonucleotide
  misc_feature 1..20: note = Target: ANGPTL4; (-) strand; PAM type: YTN; PAM sequence: TTT
  source 1..20: mol_type = other DNA
tcaatttaaagaaagacaac

SEQ ID NO: 14712 - DNA, 20 bp, synthetic construct
  misc_feature 1..20: note = Description of Artificial Sequence: Synthetic oligonucleotide
  misc_feature 1..20: note = Target: ANGPTL4; (-) strand; PAM type: YTN; PAM sequence: TTG
  source 1..20: mol_type = other DNA
ttttcaatttaaagaaagac

SEQ ID NO: 14713 - DNA, 20 bp, synthetic construct
  misc_feature 1..20: note = Description of Artificial Sequence: Synthetic oligonucleotide
  misc_feature 1..20: note = Target: ANGPTL4; (-) strand; PAM type: YTN; PAM sequence: TTT
  source 1..20: mol_type = other DNA
gttttcaatttaaagaaaga

SEQ ID NO: 14714 - DNA, 20 bp, synthetic construct
  misc_feature 1..20: note = Description of Artificial Sequence: Synthetic oligonucleotide
  misc_feature 1..20: note = Target: ANGPTL4; (-) strand; PAM type: YTN; PAM sequence: TTT
  source 1..20: mol_type = other DNA
tgttttcaatttaaagaaag

SEQ ID NO: 14715 - DNA, 20 bp, synthetic construct
  misc_feature 1..20: note = Description of Artificial Sequence: Synthetic oligonucleotide
  misc_feature 1..20: note = Target: ANGPTL4; (-) strand; PAM type: YTN; PAM sequence: TTG
  source 1..20: mol_type = other DNA
ttttgttttcaatttaaaga

SEQ ID NO: 14716 - DNA, 20 bp, synthetic construct
  misc_feature 1..20: note = Description of Artificial Sequence: Synthetic oligonucleotide
  misc_feature 1..20: note = Target: ANGPTL4; (-) strand; PAM type: YTN; PAM sequence: TTT
  source 1..20: mol_type = other DNA
gttttgttttcaatttaaag

SEQ ID NO: 14717 - DNA, 20 bp, synthetic construct
  misc_feature 1..20: note = Description of Artificial Sequence: Synthetic oligonucleotide
  misc_feature 1..20: note = Target: ANGPTL4; (-) strand; PAM type: YTN; PAM sequence: TTT
  source 1..20: mol_type = other DNA
tgttttgttttcaatttaaa

SEQ ID NO: 14718 - DNA, 20 bp, synthetic construct
  misc_feature 1..20: note = Description of Artificial Sequence: Synthetic oligonucleotide
  misc_feature 1..20: note = Target: ANGPTL4; (-) strand; PAM type: YTN; PAM sequence: TTG
  source 1..20: mol_type = other DNA
ttttgttttgttttcaattt

SEQ ID NO: 14719 - DNA, 20 bp, synthetic construct
  misc_feature 1..20: note = Description of Artificial Sequence: Synthetic oligonucleotide
  misc_feature 1..20: note = Target: ANGPTL4; (-) strand; PAM type: YTN; PAM sequence: TTT
  source 1..20: mol_type = other DNA
gttttgttttgttttcaatt

SEQ ID NO: 14720 - DNA, 20 bp, synthetic construct
  misc_feature 1..20: note = Description of Artificial Sequence: Synthetic oligonucleotide
  misc_feature 1..20: note = Target: ANGPTL4; (-) strand; PAM type: YTN; PAM sequence: TTT
  source 1..20: mol_type = other DNA
tgttttgttttgttttcaat

SEQ ID NO: 14721 - DNA, 20 bp, synthetic construct
  misc_feature 1..20: note = Description of Artificial Sequence: Synthetic oligonucleotide
  misc_feature 1..20: note = Target: ANGPTL4; (-) strand; PAM type: YTN; PAM sequence: TTT
  source 1..20: mol_type = other DNA
ttgttttgttttgttttcaa

SEQ ID NO: 14722 - DNA, 20 bp, synthetic construct
  misc_feature 1..20: note = Description of Artificial Sequence: Synthetic oligonucleotide
  misc_feature 1..20: note = Target: ANGPTL4; (-) strand; PAM type: YTN; PAM sequence: TTT
  source 1..20: mol_type = other DNA
tttgttttgttttgttttca

SEQ ID NO: 14723 - DNA, 20 bp, synthetic construct
  misc_feature 1..20: note = Description of Artificial Sequence: Synthetic oligonucleotide
  misc_feature 1..20: note = Target: ANGPTL4; (-) strand; PAM type: YTN; PAM sequence: TTT
  source 1..20: mol_type = other DNA
ttttgttttgttttgttttc

SEQ ID NO: 14724 - DNA, 20 bp, synthetic construct
  misc_feature 1..20: note = Description of Artificial Sequence: Synthetic oligonucleotide
  misc_feature 1..20: note = Target: ANGPTL4; (-) strand; PAM type: YTN; PAM sequence: TTA
  source 1..20: mol_type = other DNA
atttttttgttttgttttgt

SEQ ID NO: 14725 - DNA, 20 bp, synthetic construct
  misc_feature 1..20: note = Description of Artificial Sequence: Synthetic oligonucleotide
  misc_feature 1..20: note = Target: ANGPTL4; (-) strand; PAM type: YTN; PAM sequence: TTT
  source 1..20: mol_type = other DNA
aatttttttgttttgttttg

SEQ ID NO: 14726 - DNA, 20 bp, synthetic construct
  misc_feature 1..20: note = Description of Artificial Sequence: Synthetic oligonucleotide
  misc_feature 1..20: note = Target: ANGPTL4; (-) strand; PAM type: YTN; PAM sequence: CTT
  source 1..20: mol_type = other DNA
taatttttttgttttgtttt

SEQ ID NO: 14727 - DNA, 20 bp, synthetic construct
  misc_feature 1..20: note = Description of Artificial Sequence: Synthetic oligonucleotide
  misc_feature 1..20: note = Target: ANGPTL4; (-) strand; PAM type: YTN; PAM sequence: CTG
  source 1..20: mol_type = other DNA
cctttaatttttttgttttg

SEQ ID NO: 14728 - DNA, 20 bp, synthetic construct
  misc_feature 1..20: note = Description of Artificial Sequence: Synthetic oligonucleotide
  misc_feature 1..20: note = Target: ANGPTL4; (-) strand; PAM type: YTN; PAM sequence: TTG
  source 1..20: mol_type = other DNA
ggcaacatagcaagaccctg

SEQ ID NO: 14729 - DNA, 20 bp, synthetic construct
  misc_feature 1..20: note = Description of Artificial Sequence: Synthetic oligonucleotide
  misc_feature 1..20: note = Target: ANGPTL4; (-) strand; PAM type: YTN; PAM sequence: CTT
  source 1..20: mol_type = other DNA
gggcaacatagcaagaccct

SEQ ID NO: 14730 - DNA, 20 bp, synthetic construct
  misc_feature 1..20: note = Description of Artificial Sequence: Synthetic oligonucleotide
  misc_feature 1..20: note = Target: ANGPTL4; (-) strand; PAM type: YTN; PAM sequence: CTC
  source 1..20: mol_type = other DNA
aaaaaaaaaaaaaaaaaaaa

SEQ ID NO: 14731 - DNA, 20 bp, synthetic construct
  misc_feature 1..20: note = Description of Artificial Sequence: Synthetic oligonucleotide
  misc_feature 1..20: note = Target: ANGPTL4; (-) strand; PAM type: YTN; PAM sequence: CTC
  source 1..20: mol_type = other DNA
catctcaaaaaaaaaaaaaa

SEQ ID NO: 14732 - DNA, 20 bp, synthetic construct
  misc_feature 1..20: note = Description of Artificial Sequence: Synthetic oligonucleotide
  misc_feature 1..20: note = Target: ANGPTL4; (-) strand; PAM type: YTN; PAM sequence: CTC
  source 1..20: mol_type = other DNA
caagagcaaaactccatctc

SEQ ID NO: 14733 - DNA, 20 bp, synthetic construct
  misc_feature 1..20: note = Description of Artificial Sequence: Synthetic oligonucleotide
  misc_feature 1..20: note = Target: ANGPTL4; (-) strand; PAM type: YTN; PAM sequence: CTC
  source 1..20: mol_type = other DNA
cagctccaagagcaaaactc

SEQ ID NO: 14734 - DNA, 20 bp, synthetic construct
  misc_feature 1..20: note = Description of Artificial Sequence: Synthetic oligonucleotide
  misc_feature 1..20: note = Target: ANGPTL4; (-) strand; PAM type: YTN; PAM sequence: TTG
  source 1..20: mol_type = other DNA
cactccagctccaagagcaa

SEQ ID NO: 14735 - DNA, 20 bp, synthetic construct
  misc_feature 1..20: note = Description of Artificial Sequence: Synthetic oligonucleotide
  misc_feature 1..20: note = Target: ANGPTL4; (-) strand; PAM type: YTN; PAM sequence: CTG
  source 1..20: mol_type = other DNA
agatcgtggcattgcactcc

SEQ ID NO: 14736 - DNA, 20 bp, synthetic construct
  misc_feature 1..20: note = Description of Artificial Sequence: Synthetic oligonucleotide
  misc_feature 1..20: note = Target: ANGPTL4; (-) strand; PAM type: YTN; PAM sequence: TTC
  source 1..20: mol_type = other DNA
agtgagctgagatcgtggca

SEQ ID NO: 14737 - DNA, 20 bp, synthetic construct
  misc_feature 1..20: note = Description of Artificial Sequence: Synthetic oligonucleotide
  misc_feature 1..20: note = Target: ANGPTL4; (-) strand; PAM type: YTN; PAM sequence: TTT
  source 1..20: mol_type = other DNA
cagtgagctgagatcgtggc

SEQ ID NO: 14738 - DNA, 20 bp, synthetic construct
  misc_feature 1..20: note = Description of Artificial Sequence: Synthetic oligonucleotide
  misc_feature 1..20: note = Target: ANGPTL4; (-) strand; PAM type: YTN; PAM sequence: TTG
  source 1..20: mol_type = other DNA
aacccgggaggcggaggttt

SEQ ID NO: 14739 - DNA, 20 bp, synthetic construct
  misc_feature 1..20: note = Description of Artificial Sequence: Synthetic oligonucleotide
  misc_feature 1..20: note = Target: ANGPTL4; (-) strand; PAM type: YTN; PAM sequence: CTT
  source 1..20: mol_type = other DNA
gaacccgggaggcggaggtt

SEQ ID NO: 14740 - DNA, 20 bp, synthetic construct
  misc_feature 1..20: note = Description of Artificial Sequence: Synthetic oligonucleotide
  misc_feature 1..20: note = Target: ANGPTL4; (-) strand; PAM type: YTN; PAM sequence: TTG
  source 1..20: mol_type = other DNA
cttgaacccgggaggcggag

SEQ ID NO: 14741 - DNA, 20 bp, synthetic construct
  misc_feature 1..20: note = Description of Artificial Sequence: Synthetic oligonucleotide
  misc_feature 1..20: note = Target: ANGPTL4; (-) strand; PAM type: YTN; PAM sequence: CTG
  source 1..20: mol_type = other DNA
gagaattgcttgaacccggg

SEQ ID NO: 14742 - DNA, 20 bp, synthetic construct
  misc_feature 1..20: note = Description of Artificial Sequence: Synthetic oligonucleotide
  misc_feature 1..20: note = Target: ANGPTL4; (-) strand; PAM type: YTN; PAM sequence: CTG
  source 1..20: mol_type = other DNA
acgctggagaattgcttgaa

SEQ ID NO: 14743 - DNA, 20 bp, synthetic construct
  misc_feature 1..20: note = Description of Artificial Sequence: Synthetic oligonucleotide
  misc_feature 1..20: note = Target: ANGPTL4; (-) strand; PAM type: YTN; PAM sequence: CTG
  source 1..20: mol_type = other DNA
gggaggctgacgctggagaa

SEQ ID NO: 14744 - DNA, 20 bp, synthetic construct
  misc_feature 1..20: note = Description of Artificial Sequence: Synthetic oligonucleotide
  misc_feature 1..20: note = Target: ANGPTL4; (-) strand; PAM type: YTN; PAM sequence: CTA
  source 1..20: mol_type = other DNA
ctggggaggctgacgctgga

SEQ ID NO: 14745 - DNA, 20 bp, synthetic construct
  misc_feature 1..20: note = Description of Artificial Sequence: Synthetic oligonucleotide
  misc_feature 1..20: note = Target: ANGPTL4; (-) strand; PAM type: YTN; PAM sequence: CTC
  source 1..20: mol_type = other DNA
agctactggggaggctgacg

SEQ ID NO: 14746 - DNA, 20 bp, synthetic construct
  misc_feature 1..20: note = Description of Artificial Sequence: Synthetic oligonucleotide
  misc_feature 1..20: note = Target: ANGPTL4; (-) strand; PAM type: YTN; PAM sequence: CTG
  source 1..20: mol_type = other DNA
tagtctcagctactggggag

SEQ ID NO: 14747 - DNA, 20 bp, synthetic construct
  misc_feature 1..20: note = Description of Artificial Sequence: Synthetic oligonucleotide
  misc_feature 1..20: note = Target: ANGPTL4; (-) strand; PAM type: YTN; PAM sequence: CTC
  source 1..20: mol_type = other DNA
gcacctgtagtctcagctac

SEQ ID NO: 14748 - DNA, 20 bp, synthetic construct
  misc_feature 1..20: note = Description of Artificial Sequence: Synthetic oligonucleotide
  misc_feature 1..20: note = Target: ANGPTL4; (-) strand; PAM type: YTN; PAM sequence: TTG
  source 1..20: mol_type = other DNA
ctcgcacctgtagtctcagc

SEQ ID NO: 14749 - DNA, 20 bp, synthetic construct
  misc_feature 1..20: note = Description of Artificial Sequence: Synthetic oligonucleotide
  misc_feature 1..20: note = Target: ANGPTL4; (-) strand; PAM type: YTN; PAM sequence: CTG
  source 1..20: mol_type = other DNA
ggtgtggttgctcgcacctg

SEQ ID NO: 14750 - DNA, 20 bp, synthetic construct
  misc_feature 1..20: note = Description of Artificial Sequence: Synthetic oligonucleotide
  misc_feature 1..20: note = Target: ANGPTL4; (-) strand; PAM type: YTN; PAM sequence: TTA
  source 1..20: mol_type = other DNA
gctgggtgtggttgctcgca

SEQ ID NO: 14751 - DNA, 20 bp, synthetic construct
  misc_feature 1..20: note = Description of Artificial Sequence: Synthetic oligonucleotide
  misc_feature 1..20: note = Target: ANGPTL4; (-) strand; PAM type: YTN; PAM sequence: CTA
  source 1..20: mol_type = other DNA
aaaatacaaaaattagctgg

SEQ ID NO: 14752 - DNA, 20 bp, synthetic construct
  misc_feature 1..20: note = Description of Artificial Sequence: Synthetic oligonucleotide
  misc_feature 1..20: note = Target: ANGPTL4; (-) strand; PAM type: YTN; PAM sequence: CTA
  source 1..20: mol_type = other DNA
ctaaaaatacaaaaattagc

SEQ ID NO: 14753 - DNA, 20 bp, synthetic construct
  misc_feature 1..20: note = Description of Artificial Sequence: Synthetic oligonucleotide
  misc_feature 1..20: note = Target: ANGPTL4; (-) strand; PAM type: YTN; PAM sequence: CTC
  source 1..20: mol_type = other DNA
tactaaaaatacaaaaatta

SEQ ID NO: 14754 - DNA, 20 bp, synthetic construct
  misc_feature 1..20: note = Description of Artificial Sequence: Synthetic oligonucleotide
  misc_feature 1..20: note = Target: ANGPTL4; (-) strand; PAM type: YTN; PAM sequence: TTG
  source 1..20: mol_type = other DNA
agaccagccagaccaacatg

SEQ ID NO: 14755 - DNA, 20 bp, synthetic construct
  misc_feature 1..20: note = Description of Artificial Sequence: Synthetic oligonucleotide
  misc_feature 1..20: note = Target: ANGPTL4; (-) strand; PAM type: YTN; PAM sequence: TTT
  source 1..20: mol_type = other DNA
gagaccagccagaccaacat

SEQ ID NO: 14756 - DNA, 20 bp, synthetic construct
  misc_feature 1..20: note = Description of Artificial Sequence: Synthetic oligonucleotide
  misc_feature 1..20: note = Target: ANGPTL4; (-) strand; PAM type: YTN; PAM sequence: TTG
  source 1..20: mol_type = other DNA
aggtcaggagtttgagacca

SEQ ID NO: 14757 - DNA, 20 bp, synthetic construct
  misc_feature 1..20: note = Description of Artificial Sequence: Synthetic oligonucleotide
  misc_feature 1..20: note = Target: ANGPTL4; (-) strand; PAM type: YTN; PAM sequence: TTT
  source 1..20: mol_type = other DNA
gaggtcaggagtttgagacc

SEQ ID NO: 14758 - DNA, 20 bp, synthetic construct
  misc_feature 1..20: note = Description of Artificial Sequence: Synthetic oligonucleotide
  misc_feature 1..20: note = Target: ANGPTL4; (-) strand; PAM type: YTN; PAM sequence: TTG
  source 1..20: mol_type = other DNA
ggaggccaaagtcggcaaat

SEQ ID NO: 14759 - DNA, 20 bp, synthetic construct
  misc_feature 1..20: note = Description of Artificial Sequence: Synthetic oligonucleotide
  misc_feature 1..20: note = Target: ANGPTL4; (-) strand; PAM type: YTN; PAM sequence: TTT
  source 1..20: mol_type = other DNA
gggaggccaaagtcggcaaa

SEQ ID NO: 14760 - DNA, 20 bp, synthetic construct
  misc_feature 1..20: note = Description of Artificial Sequence: Synthetic oligonucleotide
  misc_feature 1..20: note = Target: ANGPTL4; (-) strand; PAM type: YTN; PAM sequence: TTT
  source 1..20: mol_type = other DNA
tgggaggccaaagtcggcaa

SEQ ID NO: 14761 - DNA, 20 bp, synthetic construct
  misc_feature 1..20: note = Description of Artificial Sequence: Synthetic oligonucleotide
  misc_feature 1..20: note = Target: ANGPTL4; (-) strand; PAM type: YTN; PAM sequence: CTA
  source 1..20: mol_type = other DNA
taatcccagcattttgggag

SEQ ID NO: 14762 - DNA, 20 bp, synthetic construct
  misc_feature 1..20: note = Description of Artificial Sequence: Synthetic oligonucleotide
  misc_feature 1..20: note = Target: ANGPTL4; (-) strand; PAM type: YTN; PAM sequence: CTA
  source 1..20: mol_type = other DNA
atgcctataatcccagcatt

SEQ ID NO: 14763 - DNA, 20 bp, synthetic construct
  misc_feature 1..20: note = Description of Artificial Sequence: Synthetic oligonucleotide
  misc_feature 1..20: note = Target: ANGPTL4; (-) strand; PAM type: YTN; PAM sequence: TTA
  source 1..20: mol_type = other DNA
aagaaaagaggccaggagca

SEQ ID NO: 14764 - DNA, 20 bp, synthetic construct
  misc_feature 1..20: note = Description of Artificial Sequence: Synthetic oligonucleotide
  misc_feature 1..20: note = Target: ANGPTL4; (-) strand; PAM type: YTN; PAM sequence: TTT
  source 1..20: mol_type = other DNA
aaagaaaagaggccaggagc

SEQ ID NO: 14765 - DNA, 20 bp, synthetic construct
  misc_feature 1..20: note = Description of Artificial Sequence: Synthetic oligonucleotide
  misc_feature 1..20: note = Target: ANGPTL4; (-) strand; PAM type: YTN; PAM sequence: TTT
  source 1..20: mol_type = other DNA
taaagaaaagaggccaggag

SEQ ID NO: 14766 - DNA, 20 bp, synthetic construct
  misc_feature 1..20: note = Description of Artificial Sequence: Synthetic oligonucleotide
  misc_feature 1..20: note = Target: ANGPTL4; (-) strand; PAM type: YTN; PAM sequence: CTG
  source 1..20: mol_type = other DNA
cattttaaagaaaagaggcc

SEQ ID NO: 14767 - DNA, 20 bp, synthetic construct
  misc_feature 1..20: note = Description of Artificial Sequence: Synthetic oligonucleotide
  misc_feature 1..20: note = Target: ANGPTL4; (-) strand; PAM type: YTN; PAM sequence: CTA
  source 1..20: mol_type = other DNA
cacccagacaagggctgcat

SEQ ID NO: 14768 - DNA, 20 bp, synthetic construct
  misc_feature 1..20: note = Description of Artificial Sequence: Synthetic oligonucleotide
  misc_feature 1..20: note = Target: ANGPTL4; (-) strand; PAM type: YTN; PAM sequence: TTA
  source 1..20: mol_type = other DNA
cagatatgagccactacacc

SEQ ID NO: 14769 - DNA, 20 bp, synthetic construct
  misc_feature 1..20: note = Description of Artificial Sequence: Synthetic oligonucleotide
  misc_feature 1..20: note = Target: ANGPTL4; (-) strand; PAM type: YTN; PAM sequence: CTC
  source 1..20: mol_type = other DNA
ccaaagtgtcgggattacag

SEQ ID NO: 14770 - DNA, 20 bp, synthetic construct
  misc_feature 1..20: note = Description of Artificial Sequence: Synthetic oligonucleotide
  misc_feature 1..20: note = Target: ANGPTL4; (-) strand; PAM type: YTN; PAM sequence: CTC
  source 1..20: mol_type = other DNA
atgataggcctcccaaagtg

SEQ ID NO: 14771 - DNA, 20 bp, synthetic construct
  misc_feature 1..20: note = Description of Artificial Sequence: Synthetic oligonucleotide
  misc_feature 1..20: note = Target: ANGPTL4; (-) strand; PAM type: YTN; PAM sequence: CTC
  source 1..20: mol_type = other DNA
aagtgatcctcatgataggc

SEQ ID NO: 14772 - DNA, 20 bp, synthetic construct
  misc_feature 1..20: note = Description of Artificial Sequence: Synthetic oligonucleotide
  misc_feature 1..20: note = Target: ANGPTL4; (-) strand; PAM type: YTN; PAM sequence: CTG
  source 1..20: mol_type = other DNA
ggctcaagtgatcctcatga

SEQ ID NO: 14773 - DNA, 20 bp, synthetic construct
  misc_feature 1..20: note = Description of Artificial Sequence: Synthetic oligonucleotide
  misc_feature 1..20: note = Target: ANGPTL4; (-) strand; PAM type: YTN; PAM sequence: TTC
  source 1..20: mol_type = other DNA
tgggctcaagtgatcctcat

SEQ ID NO: 14774 - DNA, 20 bp, synthetic construct
  misc_feature 1..20: note = Description of Artificial Sequence: Synthetic oligonucleotide
  misc_feature 1..20: note = Target: ANGPTL4; (-) strand; PAM type: YTN; PAM sequence: CTT
  source 1..20: mol_type = other DNA
ctgggctcaagtgatcctca

SEQ ID NO: 14775 - DNA, 20 bp, synthetic construct
  misc_feature 1..20: note = Description of Artificial Sequence: Synthetic oligonucleotide
  misc_feature 1..20: note = Target: ANGPTL4; (-) strand; PAM type: YTN; PAM sequence: CTC
  source 1..20: mol_type = other DNA
gaacttctgggctcaagtga

SEQ ID NO: 14776 - DNA, 20 bp, synthetic construct
  misc_feature 1..20: note = Description of Artificial Sequence: Synthetic oligonucleotide
  misc_feature 1..20: note = Target: ANGPTL4; (-) strand; PAM type: YTN; PAM sequence: CTG
  source 1..20: mol_type = other DNA
gtctcgaacttctgggctca

SEQ ID NO: 14777 - DNA, 20 bp, synthetic construct
  misc_feature 1..20: note = Description of Artificial Sequence: Synthetic oligonucleotide
  misc_feature 1..20: note = Target: ANGPTL4; (-) strand; PAM type: YTN; PAM sequence: TTG
  source 1..20: mol_type = other DNA
tccaggctggtctcgaactt

SEQ ID NO: 14778 - DNA, 20 bp, synthetic construct
  misc_feature 1..20: note = Description of Artificial Sequence: Synthetic oligonucleotide
  misc_feature 1..20: note = Target: ANGPTL4; (-) strand; PAM type: YTN; PAM sequence: CTA
  source 1..20: mol_type = other DNA
tgttgtccaggctggtctcg

SEQ ID NO: 14779 - DNA, 20 bp, synthetic construct
  misc_feature 1..20: note = Description of Artificial Sequence: Synthetic oligonucleotide
  misc_feature 1..20: note = Target: ANGPTL4; (-) strand; PAM type: YTN; PAM sequence: CTC
  source 1..20: mol_type = other DNA
actatgttgtccaggctggt

SEQ ID NO: 14780 - DNA, 20 bp, synthetic construct
  misc_feature 1..20: note = Description of Artificial Sequence: Synthetic oligonucleotide
  misc_feature 1..20: note = Target: ANGPTL4; (-) strand; PAM type: YTN; PAM sequence: CTC
  source 1..20: mol_type = other DNA
tcactatgttgtccaggctg

SEQ ID NO: 14781 - DNA, 20 bp, synthetic construct
  misc_feature 1..20: note = Description of Artificial Sequence: Synthetic oligonucleotide
  misc_feature 1..20: note = Target: ANGPTL4; (-) strand; PAM type: YTN; PAM sequence: TTG
  source 1..20: mol_type = other DNA
taaagatgagctctcactat

SEQ ID NO: 14782 - DNA, 20 bp, synthetic construct
  misc_feature 1..20: note = Description of Artificial Sequence: Synthetic oligonucleotide
  misc_feature 1..20: note = Target: ANGPTL4; (-) strand; PAM type: YTN; PAM sequence: TTT
  source 1..20: mol_type = other DNA
gtaaagatgagctctcacta

SEQ ID NO: 14783 - DNA, 20 bp, synthetic construct
  misc_feature 1..20: note = Description of Artificial Sequence: Synthetic oligonucleotide
  misc_feature 1..20: note = Target: ANGPTL4; (-) strand; PAM type: YTN; PAM sequence: TTT
  source 1..20: mol_type = other DNA
tgtaaagatgagctctcact

SEQ ID NO: 14784 - DNA, 20 bp, synthetic construct
  misc_feature 1..20: note = Description of Artificial Sequence: Synthetic oligonucleotide
  misc_feature 1..20: note = Target: ANGPTL4; (-) strand; PAM type: YTN; PAM sequence: TTT
  source 1..20: mol_type = other DNA
ttgtaaagatgagctctcac

SEQ ID NO: 14785 - DNA, 20 bp, synthetic construct
  misc_feature 1..20: note = Description of Artificial Sequence: Synthetic oligonucleotide
  misc_feature 1..20: note = Target: ANGPTL4; (-) strand; PAM type: YTN; PAM sequence: TTT
  source 1..20: mol_type = other DNA
tttgtaaagatgagctctca

SEQ ID NO: 14786 - DNA, 20 bp, synthetic construct
  misc_feature 1..20: note = Description of Artificial Sequence: Synthetic oligonucleotide
  misc_feature 1..20: note = Target: ANGPTL4; (-) strand; PAM type: YTN; PAM sequence: TTA
  source 1..20: mol_type = other DNA
caaaattttttgtaaagatg

SEQ ID NO: 14787 - DNA, 20 bp, synthetic construct
  misc_feature 1..20: note = Description of Artificial Sequence: Synthetic oligonucleotide
  misc_feature 1..20: note = Target: ANGPTL4; (-) strand; PAM type: YTN; PAM sequence: TTT
  source 1..20: mol_type = other DNA
acaaaattttttgtaaagat

SEQ ID NO: 14788 - DNA, 20 bp, synthetic construct
  misc_feature 1..20: note = Description of Artificial Sequence: Synthetic oligonucleotide
  misc_feature 1..20: note = Target: ANGPTL4; (-) strand; PAM type: YTN; PAM sequence: TTT
  source 1..20: mol_type = other DNA
tacaaaattttttgtaaaga

SEQ ID NO: 14789 - DNA, 20 bp, synthetic construct
  misc_feature 1..20: note = Description of Artificial Sequence: Synthetic oligonucleotide
  misc_feature 1..20: note = Target: ANGPTL4; (-) strand; PAM type: YTN; PAM sequence: CTT
  source 1..20: mol_type = other DNA
ttacaaaattttttgtaaag

SEQ ID NO: 14790 - DNA, 20 bp, synthetic construct
  misc_feature 1..20: note = Description of Artificial Sequence: Synthetic oligonucleotide
  misc_feature 1..20: note = Target: ANGPTL4; (-) strand; PAM type: YTN; PAM sequence: TTA
  source 1..20: mol_type = other DNA
cttttacaaaattttttgta

SEQ ID NO: 14791 - DNA, 20 bp, synthetic construct
  misc_feature 1..20: note = Description of Artificial Sequence: Synthetic oligonucleotide
  misc_feature 1..20: note = Target: ANGPTL4; (-) strand; PAM type: YTN; PAM sequence: TTT
  source 1..20: mol_type = other DNA
acttttacaaaattttttgt

SEQ ID NO: 14792 - DNA, 20 bp, synthetic construct
  misc_feature 1..20: note = Description of Artificial Sequence: Synthetic oligonucleotide
  misc_feature 1..20: note = Target: ANGPTL4; (-) strand; PAM type: YTN; PAM sequence: TTT
  source 1..20: mol_type = other DNA
tacttttacaaaattttttg

SEQ ID NO: 14793 - DNA, 20 bp, synthetic construct
  misc_feature 1..20: note = Description of Artificial Sequence: Synthetic oligonucleotide
  misc_feature 1..20: note = Target: ANGPTL4; (-) strand; PAM type: YTN; PAM sequence: TTT
  source 1..20: mol_type = other DNA
ttacttttacaaaatttttt

SEQ ID NO: 14794 - DNA, 20 bp, synthetic construct
  misc_feature 1..20: note = Description of Artificial Sequence: Synthetic oligonucleotide
  misc_feature 1..20: note = Target: ANGPTL4; (-) strand; PAM type: YTN; PAM sequence: TTT
  source 1..20: mol_type = other DNA
tttacttttacaaaattttt

SEQ ID NO: 14795 - DNA, 20 bp, synthetic construct
  misc_feature 1..20: note = Description of Artificial Sequence: Synthetic oligonucleotide
  misc_feature 1..20: note = Target: ANGPTL4; (-) strand; PAM type: YTN; PAM sequence: TTT
  source 1..20: mol_type = other DNA
ttttacttttacaaaatttt

SEQ ID NO: 14796 - DNA, 20 bp, synthetic construct
  misc_feature 1..20: note = Description of Artificial Sequence: Synthetic oligonucleotide
  misc_feature 1..20: note = Target: ANGPTL4; (-) strand; PAM type: YTN; PAM sequence: TTT
  source 1..20: mol_type = other DNA
tttttacttttacaaaattt

SEQ ID NO: 14797 - DNA, 20 bp, synthetic construct
  misc_feature 1..20: note = Description of Artificial Sequence: Synthetic oligonucleotide
  misc_feature 1..20: note = Target: ANGPTL4; (-) strand; PAM type: YTN; PAM sequence: TTT
  source 1..20: mol_type = other DNA
ttttttacttttacaaaatt

SEQ ID NO: 14798 - DNA, 20 bp, synthetic construct
  misc_feature 1..20: note = Description of Artificial Sequence: Synthetic oligonucleotide
  misc_feature 1..20: note = Target: ANGPTL4; (-) strand; PAM type: YTN; PAM sequence: CTT
  source 1..20: mol_type = other DNA
tttttttacttttacaaaat

SEQ ID NO: 14799 - DNA, 20 bp, synthetic construct
  misc_feature 1..20: note = Description of Artificial Sequence: Synthetic oligonucleotide
  misc_feature 1..20: note = Target: ANGPTL4; (-) strand; PAM type: YTN; PAM sequence: TTG
  source 1..20: mol_type = other DNA
gcctttttttttacttttac

SEQ ID NO: 14800 - DNA, 20 bp, synthetic construct
  misc_feature 1..20: note = Description of Artificial Sequence: Synthetic oligonucleotide
  misc_feature 1..20: note = Target: ANGPTL4; (-) strand; PAM type: YTN; PAM sequence: CTT
  source 1..20: mol_type = other DNA
ggcctttttttttactttta

SEQ ID NO: 14801 - DNA, 20 bp, synthetic construct
  misc_feature 1..20: note = Description of Artificial Sequence: Synthetic oligonucleotide
  misc_feature 1..20: note = Target: ANGPTL4; (-) strand; PAM type: YTN; PAM sequence: CTG
  source 1..20: mol_type = other DNA
cacttggcctttttttttac

SEQ ID NO: 14802 - DNA, 20 bp, synthetic construct
  misc_feature 1..20: note = Description of Artificial Sequence: Synthetic oligonucleotide
  misc_feature 1..20: note = Target: ANGPTL4; (-) strand; PAM type: YTN; PAM sequence: TTA
  source 1..20: mol_type = other DNA
caggtgtgagccactgcact

SEQ ID NO: 14803 - DNA, 20 bp, synthetic construct
  misc_feature 1..20: note = Description of Artificial Sequence: Synthetic oligonucleotide
  misc_feature 1..20: note = Target: ANGPTL4; (-) strand; PAM type: YTN; PAM sequence: CTG
  source 1..20: mol_type = other DNA
ggattacaggtgtgagccac

SEQ ID NO: 14804 - DNA, 20 bp, synthetic construct
  misc_feature 1..20: note = Description of Artificial Sequence: Synthetic oligonucleotide
  misc_feature 1..20: note = Target: ANGPTL4; (-) strand; PAM type: YTN; PAM sequence: CTC
  source 1..20: mol_type = other DNA
ccaaagtgctgggattacag

SEQ ID NO: 14805 - DNA, 20 bp, synthetic construct
  misc_feature 1..20: note = Description of Artificial Sequence: Synthetic oligonucleotide
  misc_feature 1..20: note = Target: ANGPTL4; (-) strand; PAM type: YTN; PAM sequence: CTC
  source 1..20: mol_type = other DNA
aacctcccaaagtgctggga

SEQ ID NO: 14806 - DNA, 20 bp, synthetic construct
  misc_feature 1..20: note = Description of Artificial Sequence: Synthetic oligonucleotide
  misc_feature 1..20: note = Target: ANGPTL4; (-) strand; PAM type: YTN; PAM sequence: CTG
  source 1..20: mol_type = other DNA
cctcaacctcccaaagtgct

SEQ ID NO: 14807 - DNA, 20 bp, synthetic construct
  misc_feature 1..20: note = Description of Artificial Sequence: Synthetic oligonucleotide
  misc_feature 1..20: note = Target: ANGPTL4; (-) strand; PAM type: YTN; PAM sequence: CTG
  source 1..20: mol_type = other DNA
tctgcctcaacctcccaaag

SEQ ID NO: 14808 - DNA, 20 bp, synthetic construct
  misc_feature 1..20: note = Description of Artificial Sequence: Synthetic oligonucleotide
  misc_feature 1..20: note = Target: ANGPTL4; (-) strand; PAM type: YTN; PAM sequence: CTC
  source 1..20: mol_type = other DNA
gtgatctgtctgcctcaacc

SEQ ID NO: 14809 - DNA, 20 bp, synthetic construct
  misc_feature 1..20: note = Description of Artificial Sequence: Synthetic oligonucleotide
  misc_feature 1..20: note = Target: ANGPTL4; (-) strand; PAM type: YTN; PAM sequence: CTG
  source 1..20: mol_type = other DNA
acctcgtgatctgtctgcct

SEQ ID NO: 14810 - DNA, 20 bp, synthetic construct
  misc_feature 1..20: note = Description of Artificial Sequence: Synthetic oligonucleotide
  misc_feature 1..20: note = Target: ANGPTL4; (-) strand; PAM type: YTN; PAM sequence: CTC
  source 1..20: mol_type = other DNA
ctgacctcgtgatctgtctg

SEQ ID NO: 14811 - DNA, 20 bp, synthetic construct
  misc_feature 1..20: note = Description of Artificial Sequence: Synthetic oligonucleotide
  misc_feature 1..20: note = Target: ANGPTL4; (-) strand; PAM type: YTN; PAM sequence: CTC
  source 1..20: mol_type = other DNA
gaactcctgacctcgtgatc

SEQ ID NO: 14812 - DNA, 20 bp, synthetic construct
  misc_feature 1..20: note = Description of Artificial Sequence: Synthetic oligonucleotide
  misc_feature 1..20: note = Target: ANGPTL4; (-) strand; PAM type: YTN; PAM sequence: CTG
  source 1..20: mol_type = other DNA
gtctcgaactcctgacctcg

SEQ ID NO: 14813 - DNA, 20 bp, synthetic construct
  misc_feature 1..20: note = Description of Artificial Sequence: Synthetic oligonucleotide
  misc_feature 1..20: note = Target: ANGPTL4; (-) strand; PAM type: YTN; PAM sequence: TTG
  source 1..20: mol_type = other DNA
gtcaggctggtctcgaactc

SEQ ID NO: 14814 - DNA, 20 bp, synthetic construct
  misc_feature 1..20: note = Description of Artificial Sequence: Synthetic oligonucleotide
  misc_feature 1..20: note = Target: ANGPTL4; (-) strand; PAM type: YTN; PAM sequence: TTC
  source 1..20: mol_type = other DNA
accatgttggtcaggctggt

SEQ ID NO: 14815 - DNA, 20 bp, synthetic construct
  misc_feature 1..20: note = Description of Artificial Sequence: Synthetic oligonucleotide
  misc_feature 1..20: note = Target: ANGPTL4; (-) strand; PAM type: YTN; PAM sequence: TTT
  source 1..20: mol_type = other DNA
caccatgttggtcaggctgg

SEQ ID NO: 14816 - DNA, 20 bp, synthetic construct
  misc_feature 1..20: note = Description of Artificial Sequence: Synthetic oligonucleotide
  misc_feature 1..20: note = Target: ANGPTL4; (-) strand; PAM type: YTN; PAM sequence: TTA
  source 1..20: mol_type = other DNA
gtagagacggggtttcacca

SEQ ID NO: 14817 - DNA, 20 bp, synthetic construct
  misc_feature 1..20: note = Description of Artificial Sequence: Synthetic oligonucleotide
  misc_feature 1..20: note = Target: ANGPTL4; (-) strand; PAM type: YTN; PAM sequence: TTT
  source 1..20: mol_type = other DNA
agtagagacggggtttcacc

SEQ ID NO: 14818 - DNA, 20 bp, synthetic construct
  misc_feature 1..20: note = Description of Artificial Sequence: Synthetic oligonucleotide
  misc_feature 1..20: note = Target: ANGPTL4; (-) strand; PAM type: YTN; PAM sequence: TTT
  source 1..20: mol_type = other DNA
tagtagagacggggtttcac

SEQ ID NO: 14819 - DNA, 20 bp, synthetic construct
  misc_feature 1..20: note = Description of Artificial Sequence: Synthetic oligonucleotide
  misc_feature 1..20: note = Target: ANGPTL4; (-) strand; PAM type: YTN; PAM sequence: TTT
  source 1..20: mol_type = other DNA
ttagtagagacggggtttca

SEQ ID NO: 14820 - DNA, 20 bp, synthetic construct
  misc_feature 1..20: note = Description of Artificial Sequence: Synthetic oligonucleotide
  misc_feature 1..20: note = Target: ANGPTL4; (-) strand; PAM type: YTN; PAM sequence: TTG
  source 1..20: mol_type = other DNA
tatttttagtagagacgggg

SEQ ID NO: 14821 - DNA, 20 bp, synthetic construct
  misc_feature 1..20: note = Description of Artificial Sequence: Synthetic oligonucleotide
  misc_feature 1..20: note = Target: ANGPTL4; (-) strand; PAM type: YTN; PAM sequence: TTT
  source 1..20: mol_type = other DNA
gtatttttagtagagacggg

SEQ ID NO: 14822 - DNA, 20 bp, synthetic construct
  misc_feature 1..20: note = Description of Artificial Sequence: Synthetic oligonucleotide
  misc_feature 1..20: note = Target: ANGPTL4; (-) strand; PAM type: YTN; PAM sequence: TTT
  source 1..20: mol_type = other DNA
tgtatttttagtagagacgg

SEQ ID NO: 14823 - DNA, 20 bp, synthetic construct
  misc_feature 1..20: note = Description of Artificial Sequence: Synthetic oligonucleotide
  misc_feature 1..20: note = Target: ANGPTL4; (-) strand; PAM type: YTN; PAM sequence: TTT
  source 1..20: mol_type = other DNA
ttgtatttttagtagagacg

SEQ ID NO: 14824 - DNA, 20 bp, synthetic construct
  misc_feature 1..20: note = Description of Artificial Sequence: Synthetic oligonucleotide
  misc_feature 1..20: note = Target: ANGPTL4; (-) strand; PAM type: YTN; PAM sequence: CTA
  source 1..20: mol_type = other DNA
atttttgtatttttagtaga

SEQ ID NO: 14825 - DNA, 20 bp, synthetic construct
  misc_feature 1..20: note = Description of Artificial Sequence: Synthetic oligonucleotide
  misc_feature 1..20: note = Target: ANGPTL4; (-) strand; PAM type: YTN; PAM sequence: TTA
  source 1..20: mol_type = other DNA
caggtgcacaccaccatgcc

SEQ ID NO: 14826 - DNA, 20 bp, synthetic construct
  misc_feature 1..20: note = Description of Artificial Sequence: Synthetic oligonucleotide
  misc_feature 1..20: note = Target: ANGPTL4; (-) strand; PAM type: YTN; PAM sequence: CTG
  source 1..20: mol_type = other DNA
ggattacaggtgcacaccac

SEQ ID NO: 14827 - DNA, 20 bp, synthetic construct
  misc_feature 1..20: note = Description of Artificial Sequence: Synthetic oligonucleotide
  misc_feature 1..20: note = Target: ANGPTL4; (-) strand; PAM type: YTN; PAM sequence: CTG
  source 1..20: mol_type = other DNA
agtagctgggattacaggtg

SEQ ID NO: 14828 - DNA, 20 bp, synthetic construct
  misc_feature 1..20: note = Description of Artificial Sequence: Synthetic oligonucleotide
  misc_feature 1..20: note = Target: ANGPTL4; (-) strand; PAM type: YTN; PAM sequence: CTC
  source 1..20: mol_type = other DNA
agccacctgagtagctggga

SEQ ID NO: 14829 - DNA, 20 bp, synthetic construct
  misc_feature 1..20: note = Description of Artificial Sequence: Synthetic oligonucleotide
  misc_feature 1..20: note = Target: ANGPTL4; (-) strand; PAM type: YTN; PAM sequence: CTG
  source 1..20: mol_type = other DNA
cctcagccacctgagtagct

SEQ ID NO: 14830 - DNA, 20 bp, synthetic construct
  misc_feature 1..20: note = Description of Artificial Sequence: Synthetic oligonucleotide
  misc_feature 1..20: note = Target: ANGPTL4; (-) strand; PAM type: YTN; PAM sequence: CTC
  source 1..20: mol_type = other DNA
ctgcctcagccacctgagta

SEQ ID NO: 14831 - DNA, 20 bp, synthetic construct
  misc_feature 1..20: note = Description of Artificial Sequence: Synthetic oligonucleotide
  misc_feature 1..20: note = Target: ANGPTL4; (-) strand; PAM type: YTN; PAM sequence: TTC
  source 1..20: mol_type = other DNA
tcctgcctcagccacctgag

SEQ ID NO: 14832 - DNA, 20 bp, synthetic construct
  misc_feature 1..20: note = Description of Artificial Sequence: Synthetic oligonucleotide
  misc_feature 1..20: note = Target: ANGPTL4; (-) strand; PAM type: YTN; PAM sequence: TTC
  source 1..20: mol_type = other DNA
aagagattctcctgcctcag

SEQ ID NO: 14833 - DNA, 20 bp, synthetic construct
  misc_feature 1..20: note = Description of Artificial Sequence: Synthetic oligonucleotide
  misc_feature 1..20: note = Target: ANGPTL4; (-) strand; PAM type: YTN; PAM sequence: CTC
  source 1..20: mol_type = other DNA
ccaggttcaagagattctcc

SEQ ID NO: 14834 - DNA, 20 bp, synthetic construct
  misc_feature 1..20: note = Description of Artificial Sequence: Synthetic oligonucleotide
  misc_feature 1..20: note = Target: ANGPTL4; (-) strand; PAM type: YTN; PAM sequence: CTG
  source 1..20: mol_type = other DNA
cctcccaggttcaagagatt

SEQ ID NO: 14835 - DNA, 20 bp, synthetic construct
  misc_feature 1..20: note = Description of Artificial Sequence: Synthetic oligonucleotide
  misc_feature 1..20: note = Target: ANGPTL4; (-) strand; PAM type: YTN; PAM sequence: CTC
  source 1..20: mol_type = other DNA
tgcctcccaggttcaagaga

SEQ ID NO: 14836 - DNA, 20 bp, synthetic construct
  misc_feature 1..20: note = Description of Artificial Sequence: Synthetic oligonucleotide
  misc_feature 1..20: note = Target: ANGPTL4; (-) strand; PAM type: YTN; PAM sequence: CTG
  source 1..20: mol_type = other DNA
caacctctgcctcccaggtt

SEQ ID NO: 14837 - DNA, 20 bp, synthetic construct
  misc_feature 1..20: note = Description of Artificial Sequence: Synthetic oligonucleotide
  misc_feature 1..20: note = Target: ANGPTL4; (-) strand; PAM type: YTN; PAM sequence: CTC
  source 1..20: mol_type = other DNA
actgcaacctctgcctccca

SEQ ID NO: 14838 - DNA, 20 bp, synthetic construct
  misc_feature 1..20: note = Description of Artificial Sequence: Synthetic oligonucleotide
  misc_feature 1..20: note = Target: ANGPTL4; (-) strand; PAM type: YTN; PAM sequence: CTC
  source 1..20: mol_type = other DNA
agctcactgcaacctctgcc

SEQ ID NO: 14839 - DNA, 20 bp, synthetic construct
  misc_feature 1..20: note = Description of Artificial Sequence: Synthetic oligonucleotide
  misc_feature 1..20: note = Target: ANGPTL4; (-) strand; PAM type: YTN; PAM sequence: CTG
  source 1..20: mol_type = other DNA
gagtgcggtggcgtcatctc

SEQ ID NO: 14840 - DNA, 20 bp, synthetic construct
  misc_feature 1..20: note = Description of Artificial Sequence: Synthetic oligonucleotide
  misc_feature 1..20: note = Target: ANGPTL4; (-) strand; PAM type: YTN; PAM sequence: CTG
  source 1..20: mol_type = other DNA
tcgcccaggctggagtgcgg

SEQ ID NO: 14841 - DNA, 20 bp, synthetic construct
  misc_feature 1..20: note = Description of Artificial Sequence: Synthetic oligonucleotide
  misc_feature 1..20: note = Target: ANGPTL4; (-) strand; PAM type: YTN; PAM sequence: CTC
  source 1..20: mol_type = other DNA
tgtcgcccaggctggagtgc

SEQ ID NO: 14842 - DNA, 20 bp, synthetic construct
  misc_feature 1..20: note = Description of Artificial Sequence: Synthetic oligonucleotide
  misc_feature 1..20: note = Target: ANGPTL4; (-) strand; PAM type: YTN; PAM sequence: CTC
  source 1..20: mol_type = other DNA
gctctgtcgcccaggctgga

SEQ ID NO: 14843 - DNA, 20 bp, synthetic construct
  misc_feature 1..20: note = Description of Artificial Sequence: Synthetic oligonucleotide
  misc_feature 1..20: note = Target: ANGPTL4; (-) strand; PAM type: YTN; PAM sequence: TTG
  source 1..20: mol_type = other DNA
atggggggacggagtctcgc

SEQ ID NO: 14844 - DNA, 20 bp, synthetic construct
  misc_feature 1..20: note = Description of Artificial Sequence: Synthetic oligonucleotide
  misc_feature 1..20: note = Target: ANGPTL4; (-) strand; PAM type: YTN; PAM sequence: TTT
  source 1..20: mol_type = other DNA
gatggggggacggagtctcg

SEQ ID NO: 14845 - DNA, 20 bp, synthetic construct
  misc_feature 1..20: note = Description of Artificial Sequence: Synthetic oligonucleotide
  misc_feature 1..20: note = Target: ANGPTL4; (-) strand; PAM type: YTN; PAM sequence: TTT
  source 1..20: mol_type = other DNA
tgatggggggacggagtctc

SEQ ID NO: 14846 - DNA, 20 bp, synthetic construct
  misc_feature 1..20: note = Description of Artificial Sequence: Synthetic oligonucleotide
  misc_feature 1..20: note = Target: ANGPTL4; (-) strand; PAM type: YTN; PAM sequence: TTT
  source 1..20: mol_type = other DNA
ttgatggggggacggagtct

SEQ ID NO: 14847 - DNA, 20 bp, synthetic construct
  misc_feature 1..20: note = Description of Artificial Sequence: Synthetic oligonucleotide
  misc_feature 1..20: note = Target: ANGPTL4; (-) strand; PAM type: YTN; PAM sequence: TTT
  source 1..20: mol_type = other DNA
tttgatggggggacggagtc

SEQ ID NO: 14848 - DNA, 20 bp, synthetic construct
  misc_feature 1..20: note = Description of Artificial Sequence: Synthetic oligonucleotide
  misc_feature 1..20: note = Target: ANGPTL4; (-) strand; PAM type: YTN; PAM sequence: TTT
  source 1..20: mol_type = other DNA
ttttgatggggggacggagt

SEQ ID NO: 14849 - DNA, 20 bp, synthetic construct
  misc_feature 1..20: note = Description of Artificial Sequence: Synthetic oligonucleotide
  misc_feature 1..20: note = Target: ANGPTL4; (-) strand; PAM type: YTN; PAM sequence: TTA
  source 1..20: mol_type = other DNA
tttttttgatggggggacgg

SEQ ID NO: 14850 - DNA, 20 bp, synthetic construct
  misc_feature 1..20: note = Description of Artificial Sequence: Synthetic oligonucleotide
  misc_feature 1..20: note = Target: ANGPTL4; (-) strand; PAM type: YTN; PAM sequence: TTT
  source 1..20: mol_type = other DNA
atttttttgatggggggacg

SEQ ID NO: 14851 - DNA, 20 bp, synthetic construct
  misc_feature 1..20: note = Description of Artificial Sequence: Synthetic oligonucleotide
  misc_feature 1..20: note = Target: ANGPTL4; (-) strand; PAM type: YTN; PAM sequence: TTT
  source 1..20: mol_type = other DNA
tatttttttgatggggggac

SEQ ID NO: 14852 - DNA, 20 bp, synthetic construct
  misc_feature 1..20: note = Description of Artificial Sequence: Synthetic oligonucleotide
  misc_feature 1..20: note = Target: ANGPTL4; (-) strand; PAM type: YTN; PAM sequence: TTT
  source 1..20: mol_type = other DNA
ttatttttttgatgggggga

SEQ ID NO: 14853 - DNA, 20 bp, synthetic construct
  misc_feature 1..20: note = Description of Artificial Sequence: Synthetic oligonucleotide
  misc_feature 1..20: note = Target: ANGPTL4; (-) strand; PAM type: YTN; PAM sequence: TTT
  source 1..20: mol_type = other DNA
tttatttttttgatgggggg

SEQ ID NO: 14854 - DNA, 20 bp, synthetic construct
  misc_feature 1..20: note = Description of Artificial Sequence: Synthetic oligonucleotide
  misc_feature 1..20: note = Target: ANGPTL4; (-) strand; PAM type: YTN; PAM sequence: CTT
  source 1..20: mol_type = other DNA
ttttatttttttgatggggg

SEQ ID NO: 14855 - DNA, 20 bp, synthetic construct
  misc_feature 1..20: note = Description of Artificial Sequence: Synthetic oligonucleotide
  misc_feature 1..20: note = Target: ANGPTL4; (-) strand; PAM type: YTN; PAM sequence: CTC
  source 1..20: mol_type = other DNA
ttttttatttttttgatggg

SEQ ID NO: 14856 - DNA, 20 bp, synthetic construct
  misc_feature 1..20: note = Description of Artificial Sequence: Synthetic oligonucleotide
  misc_feature 1..20: note = Target: ANGPTL4; (-) strand; PAM type: YTN; PAM sequence: TTC
  source 1..20: mol_type = other DNA
tcttttttatttttttgatg

SEQ ID NO: 14857 - DNA, 20 bp, synthetic construct
  misc_feature 1..20: note = Description of Artificial Sequence: Synthetic oligonucleotide
  misc_feature 1..20: note = Target: ANGPTL4; (-) strand; PAM type: YTN; PAM sequence: TTT
  source 1..20: mol_type = other DNA
ctcttttttatttttttgat

SEQ ID NO: 14858 - DNA, 20 bp, synthetic construct
  misc_feature 1..20: note = Description of Artificial Sequence: Synthetic oligonucleotide
  misc_feature 1..20: note = Target: ANGPTL4; (-) strand; PAM type: YTN; PAM sequence: TTT
  source 1..20: mol_type = other DNA
tctcttttttatttttttga

SEQ ID NO: 14859 - DNA, 20 bp, synthetic construct
  misc_feature 1..20: note = Description of Artificial Sequence: Synthetic oligonucleotide
  misc_feature 1..20: note = Target: ANGPTL4; (-) strand; PAM type: YTN; PAM sequence: TTA
  source 1..20: mol_type = other DNA
ttttctcttttttatttttt

SEQ ID NO: 14860 - DNA, 20 bp, synthetic construct
  misc_feature 1..20: note = Description of Artificial Sequence: Synthetic oligonucleotide
  misc_feature 1..20: note = Target: ANGPTL4; (-) strand; PAM type: YTN; PAM sequence: TTT
  source 1..20: mol_type = other DNA
attttctcttttttattttt

SEQ ID NO: 14861 - DNA, 20 bp, synthetic construct
  misc_feature 1..20: note = Description of Artificial Sequence: Synthetic oligonucleotide
  misc_feature 1..20: note = Target: ANGPTL4; (-) strand; PAM type: YTN; PAM sequence: TTT
  source 1..20: mol_type = other DNA
tattttctcttttttatttt

SEQ ID NO: 14862 - DNA, 20 bp, synthetic construct
  misc_feature 1..20: note = Description of Artificial Sequence: Synthetic oligonucleotide
  misc_feature 1..20: note = Target: ANGPTL4; (-) strand; PAM type: YTN; PAM sequence: TTA
  source 1..20: mol_type = other DNA
ttttattttctcttttttat

SEQ ID NO: 14863 - DNA, 20 bp, synthetic construct
  misc_feature 1..20: note = Description of Artificial Sequence: Synthetic oligonucleotide
  misc_feature 1..20: note = Target: ANGPTL4; (-) strand; PAM type: YTN; PAM sequence: TTT
  source 1..20: mol_type = other DNA
attttattttctctttttta

SEQ ID NO: 14864 - DNA, 20 bp, synthetic construct
  misc_feature 1..20: note = Description of Artificial Sequence: Synthetic oligonucleotide
  misc_feature 1..20: note = Target: ANGPTL4; (-) strand; PAM type: YTN; PAM sequence: TTT
  source 1..20: mol_type = other DNA
tattttattttctctttttt

SEQ ID NO: 14865 - DNA, 20 bp, synthetic construct
  misc_feature 1..20: note = Description of Artificial Sequence: Synthetic oligonucleotide
  misc_feature 1..20: note = Target: ANGPTL4; (-) strand; PAM type: YTN; PAM sequence: TTA
  source 1..20: mol_type = other DNA
ttttattttattttctcttt

SEQ ID NO: 14866 - DNA, 20 bp, synthetic construct
  misc_feature 1..20: note = Description of Artificial Sequence: Synthetic oligonucleotide
  misc_feature 1..20: note = Target: ANGPTL4; (-) strand; PAM type: YTN; PAM sequence: TTT
  source 1..20: mol_type = other DNA
attttattttattttctctt

SEQ ID NO: 14867 - DNA, 20 bp, synthetic construct
  misc_feature 1..20: note = Description of Artificial Sequence: Synthetic oligonucleotide
  misc_feature 1..20: note = Target: ANGPTL4; (-) strand; PAM type: YTN; PAM sequence: TTT
  source 1..20: mol_type = other DNA
tattttattttattttctct

SEQ ID NO: 14868 - DNA, 20 bp, synthetic construct
  misc_feature 1..20: note = Description of Artificial Sequence: Synthetic oligonucleotide
  misc_feature 1..20: note = Target: ANGPTL4; (-) strand; PAM type: YTN; PAM sequence: TTA
  source 1..20: mol_type = other DNA
ttttattttattttattttc

SEQ ID NO: 14869 - DNA, 20 bp, synthetic construct
  misc_feature 1..20: note = Description of Artificial Sequence: Synthetic oligonucleotide
  misc_feature 1..20: note = Target: ANGPTL4; (-) strand; PAM type: YTN; PAM sequence: TTT
  source 1..20: mol_type = other DNA
attttattttattttatttt

SEQ ID NO: 14870 - DNA, 20 bp, synthetic construct
  misc_feature 1..20: note = Description of Artificial Sequence: Synthetic oligonucleotide
  misc_feature 1..20: note = Target: ANGPTL4; (-) strand; PAM type: YTN; PAM sequence: TTT
  source 1..20: mol_type = other DNA
tattttattttattttattt

SEQ ID NO: 14871 - DNA, 20 bp, synthetic construct
  misc_feature 1..20: note = Description of Artificial Sequence: Synthetic oligonucleotide
  misc_feature 1..20: note = Target: ANGPTL4; (-) strand; PAM type: YTN; PAM sequence: CTG
  source 1..20: mol_type = other DNA
aattttattttattttattt

SEQ ID NO: 14872 - DNA, 20 bp, synthetic construct
  misc_feature 1..20: note = Description of Artificial Sequence: Synthetic oligonucleotide
  misc_feature 1..20: note = Target: ANGPTL4; (-) strand; PAM type: YTN; PAM sequence: CTA
  source 1..20: mol_type = other DNA
caggcatgtgccaccatgcc

SEQ ID NO: 14873 - DNA, 20 bp, synthetic construct
  misc_feature 1..20: note = Description of Artificial Sequence: Synthetic oligonucleotide
  misc_feature 1..20: note = Target: ANGPTL4; (-) strand; PAM type: YTN; PAM sequence: CTG
  source 1..20: mol_type = other DNA
ggactacaggcatgtgccac

SEQ ID NO: 14874 - DNA, 20 bp, synthetic construct
  misc_feature 1..20: note = Description of Artificial Sequence: Synthetic oligonucleotide
  misc_feature 1..20: note = Target: ANGPTL4; (-) strand; PAM type: YTN; PAM sequence: CTC
  source 1..20: mol_type = other DNA
ccgagtagctgggactacag

SEQ ID NO: 14875 - DNA, 20 bp, synthetic construct
  misc_feature 1..20: note = Description of Artificial Sequence: Synthetic oligonucleotide
  misc_feature 1..20: note = Target: ANGPTL4; (-) strand; PAM type: YTN; PAM sequence: TTG
  source 1..20: mol_type = other DNA
gcctcccgagtagctgggac

SEQ ID NO: 14876 - DNA, 20 bp, synthetic construct
  misc_feature 1..20: note = Description of Artificial Sequence: Synthetic oligonucleotide
  misc_feature 1..20: note = Target: ANGPTL4; (-) strand; PAM type: YTN; PAM sequence: CTT
  source 1..20: mol_type = other DNA
ggcctcccgagtagctggga

SEQ ID NO: 14877 - DNA, 20 bp, synthetic construct
  misc_feature 1..20: note = Description of Artificial Sequence: Synthetic oligonucleotide
  misc_feature 1..20: note = Target: ANGPTL4; (-) strand; PAM type: YTN; PAM sequence: CTG
  source 1..20: mol_type = other DNA
ccttggcctcccgagtagct

SEQ ID NO: 14878 - DNA, 20 bp, synthetic construct
  misc_feature 1..20: note = Description of Artificial Sequence: Synthetic oligonucleotide
  misc_feature 1..20: note = Target: ANGPTL4; (-) strand; PAM type: YTN; PAM sequence: CTC
  source 1..20: mol_type = other DNA
ctgccttggcctcccgagta

SEQ ID NO: 14879 - DNA, 20 bp, synthetic construct
  misc_feature 1..20: note = Description of Artificial Sequence: Synthetic oligonucleotide
  misc_feature 1..20: note = Target: ANGPTL4; (-) strand; PAM type: YTN; PAM sequence: CTG
  source 1..20: mol_type = other DNA
aagtgaccctcctgccttgg

SEQ ID NO: 14880 - DNA, 20 bp, synthetic construct
  misc_feature 1..20: note = Description of Artificial Sequence: Synthetic oligonucleotide
  misc_feature 1..20: note = Target: ANGPTL4; (-) strand; PAM type: YTN; PAM sequence: CTG
  source 1..20: mol_type = other DNA
ggctgaagtgaccctcctgc

SEQ ID NO: 14881 - DNA, 20 bp, synthetic construct
  misc_feature 1..20: note = Description of Artificial Sequence: Synthetic oligonucleotide
  misc_feature 1..20: note = Target: ANGPTL4; (-) strand; PAM type: YTN; PAM sequence: CTC
  source 1..20: mol_type = other DNA
ctgggctgaagtgaccctcc

SEQ ID NO: 14882 - DNA, 20 bp, synthetic construct
  misc_feature 1..20: note = Description of Artificial Sequence: Synthetic oligonucleotide
  misc_feature 1..20: note = Target: ANGPTL4; (-) strand; PAM type: YTN; PAM sequence: TTA
  source 1..20: mol_type = other DNA
actcctgggctgaagtgacc

SEQ ID NO: 14883 - DNA, 20 bp, synthetic construct
  misc_feature 1..20: note = Description of Artificial Sequence: Synthetic oligonucleotide
  misc_feature 1..20: note = Target: ANGPTL4; (-) strand; PAM type: YTN; PAM sequence: TTT
  source 1..20: mol_type = other DNA
aactcctgggctgaagtgac

SEQ ID NO: 14884 - DNA, 20 bp, synthetic construct
  misc_feature 1..20: note = Description of Artificial Sequence: Synthetic oligonucleotide
  misc_feature 1..20: note = Target: ANGPTL4; (-) strand; PAM type: YTN; PAM sequence: CTT
  source 1..20: mol_type = other DNA
taactcctgggctgaagtga

SEQ ID NO: 14885 - DNA, 20 bp, synthetic construct
  misc_feature 1..20: note = Description of Artificial Sequence: Synthetic oligonucleotide
  misc_feature 1..20: note = Target: ANGPTL4; (-) strand; PAM type: YTN; PAM sequence: CTC
  source 1..20: mol_type = other DNA
acggcagcctttaactcctg

SEQ ID NO: 14886 - DNA, 20 bp, synthetic construct
  misc_feature 1..20: note = Description of Artificial Sequence: Synthetic oligonucleotide
  misc_feature 1..20: note = Target: ANGPTL4; (-) strand; PAM type: YTN; PAM sequence: TTC
  source 1..20: mol_type = other DNA
acaggtgtgatcacggctca

SEQ ID NO: 14887 - DNA, 20 bp, synthetic construct
  misc_feature 1..20: note = Description of Artificial Sequence: Synthetic oligonucleotide
  misc_feature 1..20: note = Target: ANGPTL4; (-) strand; PAM type: YTN; PAM sequence: CTA
  source 1..20: mol_type = other DNA
ttcacaggtgtgatcacggc

SEQ ID NO: 14888 - DNA, 20 bp, synthetic construct
  misc_feature 1..20: note = Description of Artificial Sequence: Synthetic oligonucleotide
  misc_feature 1..20: note = Target: ANGPTL4; (-) strand; PAM type: YTN; PAM sequence: TTG
  source 1..20: mol_type = other DNA
gagtgcggtggctattcaca

SEQ ID NO: 14889 - DNA, 20 bp, synthetic construct
  misc_feature 1..20: note = Description of Artificial Sequence: Synthetic oligonucleotide
  misc_feature 1..20: note = Target: ANGPTL4; (-) strand; PAM type: YTN; PAM sequence: TTG
  source 1..20: mol_type = other DNA
cccaggttggagtgcggtgg

SEQ ID NO: 14890 - DNA, 20 bp, synthetic construct
  misc_feature 1..20: note = Description of Artificial Sequence: Synthetic oligonucleotide
  misc_feature 1..20: note = Target: ANGPTL4; (-) strand; PAM type: YTN; PAM sequence: TTG
  source 1..20: mol_type = other DNA
tgttgcccaggttggagtgc

SEQ ID NO: 14891 - DNA, 20 bp, synthetic construct
  misc_feature 1..20: note = Description of Artificial Sequence: Synthetic oligonucleotide
  misc_feature 1..20: note = Target: ANGPTL4; (-) strand; PAM type: YTN; PAM sequence: TTG
  source 1..20: mol_type = other DNA
ttgtgttgcccaggttggag

SEQ ID NO: 14892 - DNA, 20 bp, synthetic construct
  misc_feature 1..20: note = Description of Artificial Sequence: Synthetic oligonucleotide
  misc_feature 1..20: note = Target: ANGPTL4; (-) strand; PAM type: YTN; PAM sequence: TTT
  source 1..20: mol_type = other DNA
gttgtgttgcccaggttgga

SEQ ID NO: 14893 - DNA, 20 bp, synthetic construct
  misc_feature 1..20: note = Description of Artificial Sequence: Synthetic oligonucleotide
  misc_feature 1..20: note = Target: ANGPTL4; (-) strand; PAM type: YTN; PAM sequence: TTT
  source 1..20: mol_type = other DNA
tgttgtgttgcccaggttgg

SEQ ID NO: 14894 - DNA, 20 bp, synthetic construct
  misc_feature 1..20: note = Description of Artificial Sequence: Synthetic oligonucleotide
  misc_feature 1..20: note = Target: ANGPTL4; (-) strand; PAM type: YTN; PAM sequence: TTA
  source 1..20: mol_type = other DNA
gaaacgaggttttgttgtgt

SEQ ID NO: 14895 - DNA, 20 bp, synthetic construct
  misc_feature 1..20: note = Description of Artificial Sequence: Synthetic oligonucleotide
  misc_feature 1..20: note = Target: ANGPTL4; (-) strand; PAM type: YTN; PAM sequence: TTT
  source 1..20: mol_type = other DNA
agaaacgaggttttgttgtg

SEQ ID NO: 14896 - DNA, 20 bp, synthetic construct
  misc_feature 1..20: note = Description of Artificial Sequence: Synthetic oligonucleotide
  misc_feature 1..20: note = Target: ANGPTL4; (-) strand; PAM type: YTN; PAM sequence: TTT
  source 1..20: mol_type = other DNA
tagaaacgaggttttgttgt

SEQ ID NO: 14897 - DNA, 20 bp, synthetic construct
  misc_feature 1..20: note = Description of Artificial Sequence: Synthetic oligonucleotide
  misc_feature 1..20: note = Target: ANGPTL4; (-) strand; PAM type: YTN; PAM sequence: TTT
  source 1..20: mol_type = other DNA
ttagaaacgaggttttgttg

SEQ ID NO: 14898 - DNA, 20 bp, synthetic construct
  misc_feature 1..20: note = Description of Artificial Sequence: Synthetic oligonucleotide
  misc_feature 1..20: note = Target: ANGPTL4; (-) strand; PAM type: YTN; PAM sequence: TTT
  source 1..20: mol_type = other DNA
tttagaaacgaggttttgtt

SEQ ID NO: 14899 - DNA, 20 bp, synthetic construct
  misc_feature 1..20: note = Description of Artificial Sequence: Synthetic oligonucleotide
  misc_feature 1..20: note = Target: ANGPTL4; (-) strand; PAM type: YTN; PAM sequence: TTT
  source 1..20: mol_type = other DNA
ttttagaaacgaggttttgt

SEQ ID NO: 14900 - DNA, 20 bp, synthetic construct
  misc_feature 1..20: note = Description of Artificial Sequence: Synthetic oligonucleotide
  misc_feature 1..20: note = Target: ANGPTL4; (-) strand; PAM type: YTN; PAM sequence: TTT
  source 1..20: mol_type = other DNA
tttttagaaacgaggttttg

SEQ ID NO: 14901 - DNA, 20 bp, synthetic construct
  misc_feature 1..20: note = Description of Artificial Sequence: Synthetic oligonucleotide
  misc_feature 1..20: note = Target: ANGPTL4; (-) strand; PAM type: YTN; PAM sequence: TTT
  source 1..20: mol_type = other DNA
ttttttagaaacgaggtttt

SEQ ID NO: 14902 - DNA, 20 bp, synthetic construct
  misc_feature 1..20: note = Description of Artificial Sequence: Synthetic oligonucleotide
  misc_feature 1..20: note = Target: ANGPTL4; (-) strand; PAM type: YTN; PAM sequence: TTG
  source 1..20: mol_type = other DNA
tttttttttagaaacgaggt

SEQ ID NO: 14903 - DNA, 20 bp, synthetic construct
  misc_feature 1..20: note = Description of Artificial Sequence: Synthetic oligonucleotide
  misc_feature 1..20: note = Target: ANGPTL4; (-) strand; PAM type: YTN; PAM sequence: TTT
  source 1..20: mol_type = other DNA
gtttttttttagaaacgagg

SEQ ID NO: 14904 - DNA, 20 bp, synthetic construct
  misc_feature 1..20: note = Description of Artificial Sequence: Synthetic oligonucleotide
  misc_feature 1..20: note = Target: ANGPTL4; (-) strand; PAM type: YTN; PAM sequence: CTT
  source 1..20: mol_type = other DNA
tgtttttttttagaaacgag

SEQ ID NO: 14905 - DNA, 20 bp, synthetic construct
  misc_feature 1..20: note = Description of Artificial Sequence: Synthetic oligonucleotide
  misc_feature 1..20: note = Target: ANGPTL4; (-) strand; PAM type: YTN; PAM sequence: CTC
  source 1..20: mol_type = other DNA
agcctttgtttttttttaga

SEQ ID NO: 14906 - DNA, 20 bp, synthetic construct
  misc_feature 1..20: note = Description of Artificial Sequence: Synthetic oligonucleotide
  misc_feature 1..20: note = Target: ANGPTL4; (-) strand; PAM type: YTN; PAM sequence: TTC
  source 1..20: mol_type = other DNA
aggtgtaagccaccgtgctc

SEQ ID NO: 14907 - DNA, 20 bp, synthetic construct
  misc_feature 1..20: note = Description of Artificial Sequence: Synthetic oligonucleotide
  misc_feature 1..20: note = Target: ANGPTL4; (-) strand; PAM type: YTN; PAM sequence: TTT
  source 1..20: mol_type = other DNA
caggtgtaagccaccgtgct

SEQ ID NO: 14908 - DNA, 20 bp, synthetic construct
  misc_feature 1..20: note = Description of Artificial Sequence: Synthetic oligonucleotide
  misc_feature 1..20: note = Target: ANGPTL4; (-) strand; PAM type: YTN; PAM sequence: CTG
  source 1..20: mol_type = other DNA
gcatttcaggtgtaagccac

SEQ ID NO: 14909 - DNA, 20 bp, synthetic construct
  misc_feature 1..20: note = Description of Artificial Sequence: Synthetic oligonucleotide
  misc_feature 1..20: note = Target: ANGPTL4; (-) strand; PAM type: YTN; PAM sequence: CTC
  source 1..20: mol_type = other DNA
ccaaagtgctggcatttcag

SEQ ID NO: 14910 - DNA, 20 bp, synthetic construct
  misc_feature 1..20: note = Description of Artificial Sequence: Synthetic oligonucleotide
  misc_feature 1..20: note = Target: ANGPTL4; (-) strand; PAM type: YTN; PAM sequence: CTC
  source 1..20: mol_type = other DNA
agcctcccaaagtgctggca

SEQ ID NO: 14911 - DNA, 20 bp, synthetic construct
  misc_feature 1..20: note = Description of Artificial Sequence: Synthetic oligonucleotide
  misc_feature 1..20: note = Target: ANGPTL4; (-) strand; PAM type: YTN; PAM sequence: TTG
  source 1..20: mol_type = other DNA
cccgcctcagcctcccaaag

SEQ ID NO: 14912 - DNA, 20 bp, synthetic construct
  misc_feature 1..20: note = Description of Artificial Sequence: Synthetic oligonucleotide
  misc_feature 1..20: note = Target: ANGPTL4; (-) strand; PAM type: YTN; PAM sequence: TTT
  source 1..20: mol_type = other DNA
gcccgcctcagcctcccaaa

SEQ ID NO: 14913 - DNA, 20 bp, synthetic construct
  misc_feature 1..20: note = Description of Artificial Sequence: Synthetic oligonucleotide
  misc_feature 1..20: note = Target: ANGPTL4; (-) strand; PAM type: YTN; PAM sequence: CTC
  source 1..20: mol_type = other DNA
aagtgatttgcccgcctcag

SEQ ID NO: 14914 - DNA, 20 bp, synthetic construct
  misc_feature 1..20: note = Description of Artificial Sequence: Synthetic oligonucleotide
  misc_feature 1..20: note = Target: ANGPTL4; (-) strand; PAM type: YTN; PAM sequence: CTG
  source 1..20: mol_type = other DNA
acctcaagtgatttgcccgc

SEQ ID NO: 14915 - DNA, 20 bp, synthetic construct
  misc_feature 1..20: note = Description of Artificial Sequence: Synthetic oligonucleotide
  misc_feature 1..20: note = Target: ANGPTL4; (-) strand; PAM type: YTN; PAM sequence: TTC
  source 1..20: mol_type = other DNA
tgacctcaagtgatttgccc

SEQ ID NO: 14916 - DNA, 20 bp, synthetic construct
  misc_feature 1..20: note = Description of Artificial Sequence: Synthetic oligonucleotide
  misc_feature 1..20: note = Target: ANGPTL4; (-) strand; PAM type: YTN; PAM sequence: CTT
  source 1..20: mol_type = other DNA
ctgacctcaagtgatttgcc

SEQ ID NO: 14917 - DNA, 20 bp, synthetic construct
  misc_feature 1..20: note = Description of Artificial Sequence: Synthetic oligonucleotide
  misc_feature 1..20: note = Target: ANGPTL4; (-) strand; PAM type: YTN; PAM sequence: TTG
  source 1..20: mol_type = other DNA
aacttctgacctcaagtgat

SEQ ID NO: 14918 - DNA, 20 bp, synthetic construct
  misc_feature 1..20: note = Description of Artificial Sequence: Synthetic oligonucleotide
  misc_feature 1..20: note = Target: ANGPTL4; (-) strand; PAM type: YTN; PAM sequence: CTT
  source 1..20: mol_type = other DNA
gaacttctgacctcaagtga

SEQ ID NO: 14919 - DNA, 20 bp, synthetic construct
  misc_feature 1..20: note = Description of Artificial Sequence: Synthetic oligonucleotide
  misc_feature 1..20: note = Target: ANGPTL4; (-) strand; PAM type: YTN; PAM sequence: CTG
  source 1..20: mol_type = other DNA
gtcttgaacttctgacctca

SEQ ID NO: 14920 - DNA, 20 bp, synthetic construct
  misc_feature 1..20: note = Description of Artificial Sequence: Synthetic oligonucleotide
  misc_feature 1..20: note = Target: ANGPTL4; (-) strand; PAM type: YTN; PAM sequence: TTG
  source 1..20: mol_type = other DNA
gccaggctggtcttgaactt

SEQ ID NO: 14921 - DNA, 20 bp, synthetic construct
  misc_feature 1..20: note = Description of Artificial Sequence: Synthetic oligonucleotide
  misc_feature 1..20: note = Target: ANGPTL4; (-) strand; PAM type: YTN; PAM sequence: TTC
  source 1..20: mol_type = other DNA
accatgttggccaggctggt

SEQ ID NO: 14922 - DNA, 20 bp, synthetic construct
  misc_feature 1..20: note = Description of Artificial Sequence: Synthetic oligonucleotide
  misc_feature 1..20: note = Target: ANGPTL4; (-) strand; PAM type: YTN; PAM sequence: TTT
  source 1..20: mol_type = other DNA
caccatgttggccaggctgg

SEQ ID NO: 14923 - DNA, 20 bp, synthetic construct
  misc_feature 1..20: note = Description of Artificial Sequence: Synthetic oligonucleotide
  misc_feature 1..20: note = Target: ANGPTL4; (-) strand; PAM type: YTN; PAM sequence: TTG
  source 1..20: mol_type = other DNA
gtagagatagggtttcacca

SEQ ID NO: 14924 - DNA, 20 bp, synthetic construct
  misc_feature 1..20: note = Description of Artificial Sequence: Synthetic oligonucleotide
  misc_feature 1..20: note = Target: ANGPTL4; (-) strand; PAM type: YTN; PAM sequence: TTA
  source 1..20: mol_type = other DNA
tgttggtagagatagggttt

SEQ ID NO: 14925 - DNA, 20 bp, synthetic construct
  misc_feature 1..20: note = Description of Artificial Sequence: Synthetic oligonucleotide
  misc_feature 1..20: note = Target: ANGPTL4; (-) strand; PAM type: YTN; PAM sequence: TTT
  source 1..20: mol_type = other DNA
atgttggtagagatagggtt

SEQ ID NO: 14926 - DNA, 20 bp, synthetic construct
  misc_feature 1..20: note = Description of Artificial Sequence: Synthetic oligonucleotide
  misc_feature 1..20: note = Target: ANGPTL4; (-) strand; PAM type: YTN; PAM sequence: CTA
  source 1..20: mol_type = other DNA
atgtttatgttggtagagat

SEQ ID NO: 14927 - DNA, 20 bp, synthetic construct
  misc_feature 1..20: note = Description of Artificial Sequence: Synthetic oligonucleotide
  misc_feature 1..20: note = Target: ANGPTL4; (-) strand; PAM type: YTN; PAM sequence: CTG
  source 1..20: mol_type = other DNA
gaatcacaggcacgcccggc

SEQ ID NO: 14928 - DNA, 20 bp, synthetic construct
  misc_feature 1..20: note = Description of Artificial Sequence: Synthetic oligonucleotide
  misc_feature 1..20: note = Target: ANGPTL4; (-) strand; PAM type: YTN; PAM sequence: TTC
  source 1..20: mol_type = other DNA
agccccacaagcagctggaa

SEQ ID NO: 14929 - DNA, 20 bp, synthetic construct
  misc_feature 1..20: note = Description of Artificial Sequence: Synthetic oligonucleotide
  misc_feature 1..20: note = Target: ANGPTL4; (-) strand; PAM type: YTN; PAM sequence: CTT
  source 1..20: mol_type = other DNA
cagccccacaagcagctgga

SEQ ID NO: 14930 - DNA, 20 bp, synthetic construct
  misc_feature 1..20: note = Description of Artificial Sequence: Synthetic oligonucleotide
  misc_feature 1..20: note = Target: ANGPTL4; (-) strand; PAM type: YTN; PAM sequence: TTG
  source 1..20: mol_type = other DNA
tgcttcagccccacaagcag

SEQ ID NO: 14931 - DNA, 20 bp, synthetic construct
  misc_feature 1..20: note = Description of Artificial Sequence: Synthetic oligonucleotide
  misc_feature 1..20: note = Target: ANGPTL4; (-) strand; PAM type: YTN; PAM sequence: CTT
  source 1..20: mol_type = other DNA
gtgcttcagccccacaagca

SEQ ID NO: 14932 - DNA, 20 bp, synthetic construct
  misc_feature 1..20: note = Description of Artificial Sequence: Synthetic oligonucleotide
  misc_feature 1..20: note = Target: ANGPTL4; (-) strand; PAM type: YTN; PAM sequence: TTC
  source 1..20: mol_type = other DNA
ttgtgcttcagccccacaag

SEQ ID NO: 14933 - DNA, 20 bp, synthetic construct
  misc_feature 1..20: note = Description of Artificial Sequence: Synthetic oligonucleotide
  misc_feature 1..20: note = Target: ANGPTL4; (-) strand; PAM type: YTN; PAM sequence: CTC
  source 1..20: mol_type = other DNA
aagcgattcttgtgcttcag

SEQ ID NO: 14934 - DNA, 20 bp, synthetic construct
  misc_feature 1..20: note = Description of Artificial Sequence: Synthetic oligonucleotide
  misc_feature 1..20: note = Target: ANGPTL4; (-) strand; PAM type: YTN; PAM sequence: TTC
  source 1..20: mol_type = other DNA
ggggctcaagcgattcttgt

SEQ ID NO: 14935 - DNA, 20 bp, synthetic construct
  misc_feature 1..20: note = Description of Artificial Sequence: Synthetic oligonucleotide
  misc_feature 1..20: note = Target: ANGPTL4; (-) strand; PAM type: YTN; PAM sequence: CTT
  source 1..20: mol_type = other DNA
cggggctcaagcgattcttg

SEQ ID NO: 14936 - DNA, 20 bp, synthetic construct
  misc_feature 1..20: note = Description of Artificial Sequence: Synthetic oligonucleotide
  misc_feature 1..20: note = Target: ANGPTL4; (-) strand; PAM type: YTN; PAM sequence: CTG
  source 1..20: mol_type = other DNA
ccttcggggctcaagcgatt

SEQ ID NO: 14937 - DNA, 20 bp, synthetic construct
  misc_feature 1..20: note = Description of Artificial Sequence: Synthetic oligonucleotide
  misc_feature 1..20: note = Target: ANGPTL4; (-) strand; PAM type: YTN; PAM sequence: CTC
  source 1..20: mol_type = other DNA
tgccttcggggctcaagcga

SEQ ID NO: 14938 - DNA, 20 bp, synthetic construct
  misc_feature 1..20: note = Description of Artificial Sequence: Synthetic oligonucleotide
  misc_feature 1..20: note = Target: ANGPTL4; (-) strand; PAM type: YTN; PAM sequence: CTG
  source 1..20: mol_type = other DNA
caacctctgccttcggggct

SEQ ID NO: 14939 - DNA, 20 bp, synthetic construct
  misc_feature 1..20: note = Description of Artificial Sequence: Synthetic oligonucleotide
  misc_feature 1..20: note = Target: ANGPTL4; (-) strand; PAM type: YTN; PAM sequence: CTC
  source 1..20: mol_type = other DNA
actgcaacctctgccttcgg

SEQ ID NO: 14940 - DNA, 20 bp, synthetic construct
  misc_feature 1..20: note = Description of Artificial Sequence: Synthetic oligonucleotide
  misc_feature 1..20: note = Target: ANGPTL4; (-) strand; PAM type: YTN; PAM sequence: CTC
  source 1..20: mol_type = other DNA
agctcactgcaacctctgcc

SEQ ID NO: 14941 - DNA, 20 bp, synthetic construct
  misc_feature 1..20: note = Description of Artificial Sequence: Synthetic oligonucleotide
  misc_feature 1..20: note = Target: ANGPTL4; (-) strand; PAM type: YTN; PAM sequence: CTG
  source 1..20: mol_type = other DNA
gatcgcagtgccgcaatctc

SEQ ID NO: 14942 - DNA, 20 bp, synthetic construct
  misc_feature 1..20: note = Description of Artificial Sequence: Synthetic oligonucleotide
  misc_feature 1..20: note = Target: ANGPTL4; (-) strand; PAM type: YTN; PAM sequence: TTG
  source 1..20: mol_type = other DNA
cccaggctggatcgcagtgc

SEQ ID NO: 14943 - DNA, 20 bp, synthetic construct
  misc_feature 1..20: note = Description of Artificial Sequence: Synthetic oligonucleotide
  misc_feature 1..20: note = Target: ANGPTL4; (-) strand; PAM type: YTN; PAM sequence: CTG
  source 1..20: mol_type = other DNA
ttgcccaggctggatcgcag

SEQ ID NO: 14944 - DNA, 20 bp, synthetic construct
  misc_feature 1..20: note = Description of Artificial Sequence: Synthetic oligonucleotide
  misc_feature 1..20: note = Target: ANGPTL4; (-) strand; PAM type: YTN; PAM sequence: CTC
  source 1..20: mol_type = other DNA
tgttgcccaggctggatcgc

SEQ ID NO: 14945 - DNA, 20 bp, synthetic construct
  misc_feature 1..20: note = Description of Artificial Sequence: Synthetic oligonucleotide
  misc_feature 1..20: note = Target: ANGPTL4; (-) strand; PAM type: YTN; PAM sequence: CTC
  source 1..20: mol_type = other DNA
actctgttgcccaggctgga

SEQ ID NO: 14946 - DNA, 20 bp, synthetic construct
  misc_feature 1..20: note = Description of Artificial Sequence: Synthetic oligonucleotide
  misc_feature 1..20: note = Target: ANGPTL4; (-) strand; PAM type: YTN; PAM sequence: TTA
  source 1..20: mol_type = other DNA
gagatggagtctcactctgt

SEQ ID NO: 14947 - DNA, 20 bp, synthetic construct
  misc_feature 1..20: note = Description of Artificial Sequence: Synthetic oligonucleotide
  misc_feature 1..20: note = Target: ANGPTL4; (-) strand; PAM type: YTN; PAM sequence: TTT
  source 1..20: mol_type = other DNA
agagatggagtctcactctg

SEQ ID NO: 14948 - DNA, 20 bp, synthetic construct
  misc_feature 1..20: note = Description of Artificial Sequence: Synthetic oligonucleotide
  misc_feature 1..20: note = Target: ANGPTL4; (-) strand; PAM type: YTN; PAM sequence: TTT
  source 1..20: mol_type = other DNA
tagagatggagtctcactct

SEQ ID NO: 14949 - DNA, 20 bp, synthetic construct
  misc_feature 1..20: note = Description of Artificial Sequence: Synthetic oligonucleotide
  misc_feature 1..20: note = Target: ANGPTL4; (-) strand; PAM type: YTN; PAM sequence: TTT
  source 1..20: mol_type = other DNA
ttagagatggagtctcactc

SEQ ID NO: 14950 - DNA, 20 bp, synthetic construct
  misc_feature 1..20: note = Description of Artificial Sequence: Synthetic oligonucleotide
  misc_feature 1..20: note = Target: ANGPTL4; (-) strand; PAM type: YTN; PAM sequence: TTT
  source 1..20: mol_type = other DNA
tttagagatggagtctcact

SEQ ID NO: 14951 - DNA, 20 bp, synthetic construct
  misc_feature 1..20: note = Description of Artificial Sequence: Synthetic oligonucleotide
  misc_feature 1..20: note = Target: ANGPTL4; (-) strand; PAM type: YTN; PAM sequence: TTT
  source 1..20: mol_type = other DNA
ttttagagatggagtctcac

SEQ ID NO: 14952 - DNA, 20 bp, synthetic construct
  misc_feature 1..20: note = Description of Artificial Sequence: Synthetic oligonucleotide
  misc_feature 1..20: note = Target: ANGPTL4; (-) strand; PAM type: YTN; PAM sequence: TTT
  source 1..20: mol_type = other DNA
tttttagagatggagtctca

SEQ ID NO: 14953 - DNA, 20 bp, synthetic construct
  misc_feature 1..20: note = Description of Artificial Sequence: Synthetic oligonucleotide
  misc_feature 1..20: note = Target: ANGPTL4; (-) strand; PAM type: YTN; PAM sequence: TTT
  source 1..20: mol_type = other DNA
ttttttagagatggagtctc

SEQ ID NO: 14954 - DNA, 20 bp, synthetic construct
  misc_feature 1..20: note = Description of Artificial Sequence: Synthetic oligonucleotide
  misc_feature 1..20: note = Target: ANGPTL4; (-) strand; PAM type: YTN; PAM sequence: TTT
  source 1..20: mol_type = other DNA
tttttttagagatggagtct

SEQ ID NO: 14955 - DNA, 20 bp, synthetic construct
  misc_feature 1..20: note = Description of Artificial Sequence: Synthetic oligonucleotide
  misc_feature 1..20: note = Target: ANGPTL4; (-) strand; PAM type: YTN; PAM sequence: TTT
  source 1..20: mol_type = other DNA
ttttttttagagatggagtc

SEQ ID NO: 14956 - DNA, 20 bp, synthetic construct
  misc_feature 1..20: note = Description of Artificial Sequence: Synthetic oligonucleotide
  misc_feature 1..20: note = Target: ANGPTL4; (-) strand; PAM type: YTN; PAM sequence: TTT
  source 1..20: mol_type = other DNA
tttttttttagagatggagt

SEQ ID NO: 14957 - DNA, 20 bp, synthetic construct
  misc_feature 1..20: note = Description of Artificial Sequence: Synthetic oligonucleotide
  misc_feature 1..20: note = Target: ANGPTL4; (-) strand; PAM type: YTN; PAM sequence: TTT
  source 1..20: mol_type = other DNA
ttttttttttagagatggag

SEQ ID NO: 14958 - DNA, 20 bp, synthetic construct
  misc_feature 1..20: note = Description of Artificial Sequence: Synthetic oligonucleotide
  misc_feature 1..20: note = Target: ANGPTL4; (-) strand; PAM type: YTN; PAM sequence: TTT
  source 1..20: mol_type = other DNA
tttttttttttagagatgga

SEQ ID NO: 14959 - DNA, 20 bp, synthetic construct
  misc_feature 1..20: note = Description of Artificial Sequence: Synthetic oligonucleotide
  misc_feature 1..20: note = Target: ANGPTL4; (-) strand; PAM type: YTN; PAM sequence: TTT
  source 1..20: mol_type = other DNA
ttttttttttttagagatgg

SEQ ID NO: 14960 - DNA, 20 bp, synthetic construct
  misc_feature 1..20: note = Description of Artificial Sequence: Synthetic oligonucleotide
  misc_feature 1..20: note = Target: ANGPTL4; (-) strand; PAM type: YTN; PAM sequence: TTT
  source 1..20: mol_type = other DNA
tttttttttttttagagatg

SEQ ID NO: 14961 - DNA, 20 bp, synthetic construct
  misc_feature 1..20: note = Description of Artificial Sequence: Synthetic oligonucleotide
  misc_feature 1..20: note = Target: ANGPTL4; (-) strand; PAM type: YTN; PAM sequence: TTT
  source 1..20: mol_type = other DNA
ttttttttttttttagagat

SEQ ID NO: 14962 - DNA, 20 bp, synthetic construct
  misc_feature 1..20: note = Description of Artificial Sequence: Synthetic oligonucleotide
  misc_feature 1..20: note = Target: ANGPTL4; (-) strand; PAM type: YTN; PAM sequence: TTT
  source 1..20: mol_type = other DNA
tttttttttttttttagaga

SEQ ID NO: 14963 - DNA, 20 bp, synthetic construct
  misc_feature 1..20: note = Description of Artificial Sequence: Synthetic oligonucleotide
  misc_feature 1..20: note = Target: ANGPTL4; (-) strand; PAM type: YTN; PAM sequence: TTT
  source 1..20: mol_type = other DNA
ttttttttttttttttagag

SEQ ID NO: 14964 - DNA, 20 bp, synthetic construct
  misc_feature 1..20: note = Description of Artificial Sequence: Synthetic oligonucleotide
  misc_feature 1..20: note = Target: ANGPTL4; (-) strand; PAM type: YTN; PAM sequence: TTT
  source 1..20: mol_type = other DNA
tttttttttttttttttaga

SEQ ID NO: 14965 - DNA, 20 bp, synthetic construct
  misc_feature 1..20: note = Description of Artificial Sequence: Synthetic oligonucleotide
  misc_feature 1..20: note = Target: ANGPTL4; (-) strand; PAM type: YTN; PAM sequence: TTT
  source 1..20: mol_type = other DNA
ttttttttttttttttttag

SEQ ID NO: 14966 - DNA, 20 bp, synthetic construct
  misc_feature 1..20: note = Description of Artificial Sequence: Synthetic oligonucleotide
  misc_feature 1..20: note = Target: ANGPTL4; (-) strand; PAM type: YTN; PAM sequence: CTT
  source 1..20: mol_type = other DNA
ttttttttttttttttttta

SEQ ID NO: 14967 - DNA, 20 bp, synthetic construct
  misc_feature 1..20: note = Description of Artificial Sequence: Synthetic oligonucleotide
  misc_feature 1..20: note = Target: ANGPTL4; (-) strand; PAM type: YTN; PAM sequence: TTC
  source 1..20: mol_type = other DNA
tttttttttttttttttttt

SEQ ID NO: 14968 - DNA, 20 bp, synthetic construct
  misc_feature 1..20: note = Description of Artificial Sequence: Synthetic oligonucleotide
  misc_feature 1..20: note = Target: ANGPTL4; (-) strand; PAM type: YTN; PAM sequence: TTT
  source 1..20: mol_type = other DNA
cttttttttttttttttttt

SEQ ID NO: 14969 - DNA, 20 bp, synthetic construct
  misc_feature 1..20: note = Description of Artificial Sequence: Synthetic oligonucleotide
  misc_feature 1..20: note = Target: ANGPTL4; (-) strand; PAM type: YTN; PAM sequence: CTT
  source 1..20: mol_type = other DNA
tctttttttttttttttttt

SEQ ID NO: 14970 - DNA, 20 bp, synthetic construct
  misc_feature 1..20: note = Description of Artificial Sequence: Synthetic oligonucleotide
  misc_feature 1..20: note = Target: ANGPTL4; (-) strand; PAM type: YTN; PAM sequence: CTC
  source 1..20: mol_type = other DNA
agtggaaaaaaaagctttct

SEQ ID NO: 14971 - DNA, 20 bp, synthetic construct
  misc_feature 1..20: note = Description of Artificial Sequence: Synthetic oligonucleotide
  misc_feature 1..20: note = Target: ANGPTL4; (-) strand; PAM type: YTN; PAM sequence: TTC
  source 1..20: mol_type = other DNA
tcagtggaaaaaaaagcttt

SEQ ID NO: 14972 - DNA, 20 bp, synthetic construct
  misc_feature 1..20: note = Description of Artificial Sequence: Synthetic oligonucleotide
  misc_feature 1..20: note = Target: ANGPTL4; (-) strand; PAM type: YTN; PAM sequence: CTT
  source 1..20: mol_type = other DNA
ctcagtggaaaaaaaagctt

SEQ ID NO: 14973 - DNA, 20 bp, synthetic construct
  misc_feature 1..20: note = Description of Artificial Sequence: Synthetic oligonucleotide
  misc_feature 1..20: note = Target: ANGPTL4; (-) strand; PAM type: YTN; PAM sequence: TTG
  source 1..20: mol_type = other DNA
taatggaaaggacttctcag

SEQ ID NO: 14974 - DNA, 20 bp, synthetic construct
  misc_feature 1..20: note = Description of Artificial Sequence: Synthetic oligonucleotide
  misc_feature 1..20: note = Target: ANGPTL4; (-) strand; PAM type: YTN; PAM sequence: CTT
  source 1..20: mol_type = other DNA
gtaatggaaaggacttctca

SEQ ID NO: 14975 - DNA, 20 bp, synthetic construct
  misc_feature 1..20: note = Description of Artificial Sequence: Synthetic oligonucleotide
  misc_feature 1..20: note = Target: ANGPTL4; (-) strand; PAM type: YTN; PAM sequence: CTC
  source 1..20: mol_type = other DNA
ttgtaatggaaaggacttct

SEQ ID NO: 14976 - DNA, 20 bp, synthetic construct
  misc_feature 1..20: note = Description of Artificial Sequence: Synthetic oligonucleotide
  misc_feature 1..20: note = Target: ANGPTL4; (-) strand; PAM type: YTN; PAM sequence: TTG
  source 1..20: mol_type = other DNA
taacctcttgtaatggaaag

SEQ ID NO: 14977 - DNA, 20 bp, synthetic construct
  misc_feature 1..20: note = Description of Artificial Sequence: Synthetic oligonucleotide
  misc_feature 1..20: note = Target: ANGPTL4; (-) strand; PAM type: YTN; PAM sequence: CTG
  source 1..20: mol_type = other DNA
ggtaaaaccccgtgttgtaa

SEQ ID NO: 14978 - DNA, 20 bp, synthetic construct
  misc_feature 1..20: note = Description of Artificial Sequence: Synthetic oligonucleotide
  misc_feature 1..20: note = Target: ANGPTL4; (-) strand; PAM type: YTN; PAM sequence: CTG
  source 1..20: mol_type = other DNA
aactgggtaaaaccccgtgt

SEQ ID NO: 14979 - DNA, 20 bp, synthetic construct
  misc_feature 1..20: note = Description of Artificial Sequence: Synthetic oligonucleotide
  misc_feature 1..20: note = Target: ANGPTL4; (-) strand; PAM type: YTN; PAM sequence: CTG
  source 1..20: mol_type = other DNA
ggccagctgaactgggtaaa

SEQ ID NO: 14980 - DNA, 20 bp, synthetic construct
  misc_feature 1..20: note = Description of Artificial Sequence: Synthetic oligonucleotide
  misc_feature 1..20: note = Target: ANGPTL4; (-) strand; PAM type: YTN; PAM sequence: CTC
  source 1..20: mol_type = other DNA
tgggccagctgaactgggta

SEQ ID NO: 14981 - DNA, 20 bp, synthetic construct
  misc_feature 1..20: note = Description of Artificial Sequence: Synthetic oligonucleotide
  misc_feature 1..20: note = Target: ANGPTL4; (-) strand; PAM type: YTN; PAM sequence: CTC
  source 1..20: mol_type = other DNA
tctgggccagctgaactggg

SEQ ID NO: 14982 - DNA, 20 bp, synthetic construct
  misc_feature 1..20: note = Description of Artificial Sequence: Synthetic oligonucleotide
  misc_feature 1..20: note = Target: ANGPTL4; (-) strand; PAM type: YTN; PAM sequence: CTG
  source 1..20: mol_type = other DNA
caaagcctctctgggccagc

SEQ ID NO: 14983 - DNA, 20 bp, synthetic construct
  misc_feature 1..20: note = Description of Artificial Sequence: Synthetic oligonucleotide
  misc_feature 1..20: note = Target: ANGPTL4; (-) strand; PAM type: YTN; PAM sequence: CTG
  source 1..20: mol_type = other DNA
agtgtgggagggagtaggca

SEQ ID NO: 14984 - DNA, 20 bp, synthetic construct
  misc_feature 1..20: note = Description of Artificial Sequence: Synthetic oligonucleotide
  misc_feature 1..20: note = Target: ANGPTL4; (-) strand; PAM type: YTN; PAM sequence: TTG
  source 1..20: mol_type = other DNA
tcccaagaacccagcaggga

SEQ ID NO: 14985 - DNA, 20 bp, synthetic construct
  misc_feature 1..20: note = Description of Artificial Sequence: Synthetic oligonucleotide
  misc_feature 1..20: note = Target: ANGPTL4; (-) strand; PAM type: YTN; PAM sequence: TTT
  source 1..20: mol_type = other DNA
gtcccaagaacccagcaggg

SEQ ID NO: 14986 - DNA, 20 bp, synthetic construct
  misc_feature 1..20: note = Description of Artificial Sequence: Synthetic oligonucleotide
  misc_feature 1..20: note = Target: ANGPTL4; (-) strand; PAM type: YTN; PAM sequence: CTT
  source 1..20: mol_type = other DNA
tgtcccaagaacccagcagg

SEQ ID NO: 14987 - DNA, 20 bp, synthetic construct
  misc_feature 1..20: note = Description of Artificial Sequence: Synthetic oligonucleotide
  misc_feature 1..20: note = Target: ANGPTL4; (-) strand; PAM type: YTN; PAM sequence: TTG
  source 1..20: mol_type = other DNA
ggaagatctttgtcccaaga

SEQ ID NO: 14988 - DNA, 20 bp, synthetic construct
  misc_feature 1..20: note = Description of Artificial Sequence: Synthetic oligonucleotide
  misc_feature 1..20: note = Target: ANGPTL4; (-) strand; PAM type: YTN; PAM sequence: CTT
  source 1..20: mol_type = other DNA
gggaagatctttgtcccaag

SEQ ID NO: 14989 - DNA, 20 bp, synthetic construct
  misc_feature 1..20: note = Description of Artificial Sequence: Synthetic oligonucleotide
  misc_feature 1..20: note = Target: ANGPTL4; (-) strand; PAM type: YTN; PAM sequence: CTG
  source 1..20: mol_type = other DNA
gccttgggaagatctttgtc

SEQ ID NO: 14990 - DNA, 20 bp, synthetic construct
  misc_feature 1..20: note = Description of Artificial Sequence: Synthetic oligonucleotide
  misc_feature 1..20: note = Target: ANGPTL4; (-) strand; PAM type: YTN; PAM sequence: TTA
  source 1..20: mol_type = other DNA
tgggctggccttgggaagat

SEQ ID NO: 14991 - DNA, 20 bp, synthetic construct
  misc_feature 1..20: note = Description of Artificial Sequence: Synthetic oligonucleotide
  misc_feature 1..20: note = Target: ANGPTL4; (-) strand; PAM type: YTN; PAM sequence: CTC
  source 1..20: mol_type = other DNA
gaggagggtgggtcagaggg

SEQ ID NO: 14992 - DNA, 20 bp, synthetic construct
  misc_feature 1..20: note = Description of Artificial Sequence: Synthetic oligonucleotide
  misc_feature 1..20: note = Target: ANGPTL4; (-) strand; PAM type: YTN; PAM sequence: CTG
  source 1..20: mol_type = other DNA
gaggactcgaggagggtggg

SEQ ID NO: 14993 - DNA, 20 bp, synthetic construct
  misc_feature 1..20: note = Description of Artificial Sequence: Synthetic oligonucleotide
  misc_feature 1..20: note = Target: ANGPTL4; (-) strand; PAM type: YTN; PAM sequence: CTC
  source 1..20: mol_type = other DNA
atccctggaggactcgagga

SEQ ID NO: 14994 - DNA, 20 bp, synthetic construct
  misc_feature 1..20: note = Description of Artificial Sequence: Synthetic oligonucleotide
  misc_feature 1..20: note = Target: ANGPTL4; (-) strand; PAM type: YTN; PAM sequence: CTC
  source 1..20: mol_type = other DNA
actcatccctggaggactcg

SEQ ID NO: 14995 - DNA, 20 bp, synthetic construct
  misc_feature 1..20: note = Description of Artificial Sequence: Synthetic oligonucleotide
  misc_feature 1..20: note = Target: ANGPTL4; (-) strand; PAM type: YTN; PAM sequence: CTC
  source 1..20: mol_type = other DNA
cctcactcatccctggagga

SEQ ID NO: 14996 - DNA, 20 bp, synthetic construct
  misc_feature 1..20: note = Description of Artificial Sequence: Synthetic oligonucleotide
  misc_feature 1..20: note = Target: ANGPTL4; (-) strand; PAM type: YTN; PAM sequence: CTC
  source 1..20: mol_type = other DNA
caaacccaggaagacagcag

SEQ ID NO: 14997 - DNA, 20 bp, synthetic construct
  misc_feature 1..20: note = Description of Artificial Sequence: Synthetic oligonucleotide
  misc_feature 1..20: note = Target: ANGPTL4; (-) strand; PAM type: YTN; PAM sequence: CTG
  source 1..20: mol_type = other DNA
ccaagcaccaaaccccctcc

SEQ ID NO: 14998 - DNA, 20 bp, synthetic construct
  misc_feature 1..20: note = Description of Artificial Sequence: Synthetic oligonucleotide
  misc_feature 1..20: note = Target: ANGPTL4; (-) strand; PAM type: YTN; PAM sequence: CTG
  source 1..20: mol_type = other DNA
gctgccaagcaccaaacccc

SEQ ID NO: 14999 - DNA, 20 bp, synthetic construct
  misc_feature 1..20: note = Description of Artificial Sequence: Synthetic oligonucleotide
  misc_feature 1..20: note = Target: ANGPTL4; (-) strand; PAM type: YTN; PAM sequence: CTC
  source 1..20: mol_type = other DNA
atctggctgccaagcaccaa

SEQ ID NO: 15000 - DNA, 20 bp, synthetic construct
  misc_feature 1..20: note = Description of Artificial Sequence: Synthetic oligonucleotide
  misc_feature 1..20: note = Target: ANGPTL4; (-) strand; PAM type: YTN; PAM sequence: CTC
  source 1..20: mol_type = other DNA
cctcatctggctgccaagca

SEQ ID NO: 15001 - DNA, 20 bp, synthetic construct
  misc_feature 1..20: note = Description of Artificial Sequence: Synthetic oligonucleotide
  misc_feature 1..20: note = Target: ANGPTL4; (-) strand; PAM type: YTN; PAM sequence: TTC
  source 1..20: mol_type = other DNA
acagacgaccccactccctc

SEQ ID NO: 15002 - DNA, 20 bp, synthetic construct
  misc_feature 1..20: note = Description of Artificial Sequence: Synthetic oligonucleotide
  misc_feature 1..20: note = Target: ANGPTL4; (-) strand; PAM type: YTN; PAM sequence: CTT
  source 1..20: mol_type = other DNA
cacagacgaccccactccct

SEQ ID NO: 15003 - DNA, 20 bp, synthetic construct
  misc_feature 1..20: note = Description of Artificial Sequence: Synthetic oligonucleotide
  misc_feature 1..20: note = Target: ANGPTL4; (-) strand; PAM type: YTN; PAM sequence: CTC
  source 1..20: mol_type = other DNA
ttcacagacgaccccactcc

SEQ ID NO: 15004 - DNA, 20 bp, synthetic construct
  misc_feature 1..20: note = Description of Artificial Sequence: Synthetic oligonucleotide
  misc_feature 1..20: note = Target: ANGPTL4; (-) strand; PAM type: YTN; PAM sequence: CTG
  source 1..20: mol_type = other DNA
cccagaaaggtacaaggtca

SEQ ID NO: 15005 - DNA, 20 bp, synthetic construct
  misc_feature 1..20: note = Description of Artificial Sequence: Synthetic oligonucleotide
  misc_feature 1..20: note = Target: ANGPTL4; (-) strand; PAM type: YTN; PAM sequence: CTC
  source 1..20: mol_type = other DNA
catctgcccagaaaggtaca

SEQ ID NO: 15006 - DNA, 20 bp, synthetic construct
  misc_feature 1..20: note = Description of Artificial Sequence: Synthetic oligonucleotide
  misc_feature 1..20: note = Target: ANGPTL4; (-) strand; PAM type: YTN; PAM sequence: CTG
  source 1..20: mol_type = other DNA
tccagcctccatctgcccag

SEQ ID NO: 15007 - DNA, 20 bp, synthetic construct
  misc_feature 1..20: note = Description of Artificial Sequence: Synthetic oligonucleotide
  misc_feature 1..20: note = Target: ANGPTL4; (-) strand; PAM type: YTN; PAM sequence: TTA
  source 1..20: mol_type = other DNA
ctgtccagcctccatctgcc

SEQ ID NO: 15008 - DNA, 20 bp, synthetic construct
  misc_feature 1..20: note = Description of Artificial Sequence: Synthetic oligonucleotide
  misc_feature 1..20: note = Target: ANGPTL4; (-) strand; PAM type: YTN; PAM sequence: CTG
  source 1..20: mol_type = other DNA
aattactgtccagcctccat

SEQ ID NO: 15009 - DNA, 20 bp, synthetic construct
  misc_feature 1..20: note = Description of Artificial Sequence: Synthetic oligonucleotide
  misc_feature 1..20: note = Target: ANGPTL4; (-) strand; PAM type: YTN; PAM sequence: CTC
  source 1..20: mol_type = other DNA
tgaattactgtccagcctcc

SEQ ID NO: 15010 - DNA, 20 bp, synthetic construct
  misc_feature 1..20: note = Description of Artificial Sequence: Synthetic oligonucleotide
  misc_feature 1..20: note = Target: ANGPTL4; (-) strand; PAM type: YTN; PAM sequence: CTG
  source 1..20: mol_type = other DNA
agccatcgtggcgcctctga

SEQ ID NO: 15011 - DNA, 20 bp, synthetic construct
  misc_feature 1..20: note = Description of Artificial Sequence: Synthetic oligonucleotide
  misc_feature 1..20: note = Target: ANGPTL4; (-) strand; PAM type: YTN; PAM sequence: TTG
  source 1..20: mol_type = other DNA
aagtccactgagccatcgtg

SEQ ID NO: 15012 - DNA, 20 bp, synthetic construct
  misc_feature 1..20: note = Description of Artificial Sequence: Synthetic oligonucleotide
  misc_feature 1..20: note = Target: ANGPTL4; (-) strand; PAM type: YTN; PAM sequence: TTC
  source 1..20: mol_type = other DNA
ccagggccggttgaagtcca

SEQ ID NO: 15013 - DNA, 20 bp, synthetic construct
  misc_feature 1..20: note = Description of Artificial Sequence: Synthetic oligonucleotide
  misc_feature 1..20: note = Target: ANGPTL4; (-) strand; PAM type: YTN; PAM sequence: CTT
  source 1..20: mol_type = other DNA
cccagggccggttgaagtcc

SEQ ID NO: 15014 - DNA, 20 bp, synthetic construct
  misc_feature 1..20: note = Description of Artificial Sequence: Synthetic oligonucleotide
  misc_feature 1..20: note = Target: ANGPTL4; (-) strand; PAM type: YTN; PAM sequence: TTG
  source 1..20: mol_type = other DNA
taggcttcccagggccggtt

SEQ ID NO: 15015 - DNA, 20 bp, synthetic construct
  misc_feature 1..20: note = Description of Artificial Sequence: Synthetic oligonucleotide
  misc_feature 1..20: note = Target: ANGPTL4; (-) strand; PAM type: YTN; PAM sequence: CTT
  source 1..20: mol_type = other DNA
gtaggcttcccagggccggt

SEQ ID NO: 15016 - DNA, 20 bp, synthetic construct
  misc_feature 1..20: note = Description of Artificial Sequence: Synthetic oligonucleotide
  misc_feature 1..20: note = Target: ANGPTL4; (-) strand; PAM type: YTN; PAM sequence: CTA
  source 1..20: mol_type = other DNA
ccgtggggatccccaaaccc

SEQ ID NO: 15017 - DNA, 20 bp, synthetic construct
  misc_feature 1..20: note = Description of Artificial Sequence: Synthetic oligonucleotide
  misc_feature 1..20: note = Target: ANGPTL4; (-) strand; PAM type: YTN; PAM sequence: CTA
  source 1..20: mol_type = other DNA
gaaacacctaccgtggggat

SEQ ID NO: 15018 - DNA, 20 bp, synthetic construct
  misc_feature 1..20: note = Description of Artificial Sequence: Synthetic oligonucleotide
  misc_feature 1..20: note = Target: ANGPTL4; (-) strand; PAM type: YTN; PAM sequence: CTG
  source 1..20: mol_type = other DNA
tccccactagaaacacctac

SEQ ID NO: 15019 - DNA, 20 bp, synthetic construct
  misc_feature 1..20: note = Description of Artificial Sequence: Synthetic oligonucleotide
  misc_feature 1..20: note = Target: ANGPTL4; (-) strand; PAM type: YTN; PAM sequence: CTC
  source 1..20: mol_type = other DNA
tgtccccactagaaacacct

SEQ ID NO: 15020 - DNA, 20 bp, synthetic construct
  misc_feature 1..20: note = Description of Artificial Sequence: Synthetic oligonucleotide
  misc_feature 1..20: note = Target: ANGPTL4; (-) strand; PAM type: YTN; PAM sequence: CTG
  source 1..20: mol_type = other DNA
cctctgtccccactagaaac

SEQ ID NO: 15021 - DNA, 20 bp, synthetic construct
  misc_feature 1..20: note = Description of Artificial Sequence: Synthetic oligonucleotide
  misc_feature 1..20: note = Target: ANGPTL4; (-) strand; PAM type: YTN; PAM sequence: CTC
  source 1..20: mol_type = other DNA
ccctgcctctgtccccacta

SEQ ID NO: 15022 - DNA, 20 bp, synthetic construct
  misc_feature 1..20: note = Description of Artificial Sequence: Synthetic oligonucleotide
  misc_feature 1..20: note = Target: ANGPTL4; (-) strand; PAM type: YTN; PAM sequence: TTC
  source 1..20: mol_type = other DNA
ctcccctgcctctgtcccca

SEQ ID NO: 15023 - DNA, 20 bp, synthetic construct
  misc_feature 1..20: note = Description of Artificial Sequence: Synthetic oligonucleotide
  misc_feature 1..20: note = Target: ANGPTL4; (-) strand; PAM type: YTN; PAM sequence: CTT
  source 1..20: mol_type = other DNA
cctcccctgcctctgtcccc

SEQ ID NO: 15024 - DNA, 20 bp, synthetic construct
  misc_feature 1..20: note = Description of Artificial Sequence: Synthetic oligonucleotide
  misc_feature 1..20: note = Target: ANGPTL4; (-) strand; PAM type: YTN; PAM sequence: CTC
  source 1..20: mol_type = other DNA
ttcctcccctgcctctgtcc

SEQ ID NO: 15025 - DNA, 20 bp, synthetic construct
  misc_feature 1..20: note = Description of Artificial Sequence: Synthetic oligonucleotide
  misc_feature 1..20: note = Target: ANGPTL4; (-) strand; PAM type: YTN; PAM sequence: CTG
  source 1..20: mol_type = other DNA
agggtccctcttcctcccct

SEQ ID NO: 15026 - DNA, 20 bp, synthetic construct
  misc_feature 1..20: note = Description of Artificial Sequence: Synthetic oligonucleotide
  misc_feature 1..20: note = Target: ANGPTL4; (-) strand; PAM type: YTN; PAM sequence: TTC
  source 1..20: mol_type = other DNA
tgagggtccctcttcctccc

SEQ ID NO: 15027 - DNA, 20 bp, synthetic construct
  misc_feature 1..20: note = Description of Artificial Sequence: Synthetic oligonucleotide
  misc_feature 1..20: note = Target: ANGPTL4; (-) strand; PAM type: YTN; PAM sequence: CTT
  source 1..20: mol_type = other DNA
ctgagggtccctcttcctcc

SEQ ID NO: 15028 - DNA, 20 bp, synthetic construct
  misc_feature 1..20: note = Description of Artificial Sequence: Synthetic oligonucleotide
  misc_feature 1..20: note = Target: ANGPTL4; (-) strand; PAM type: YTN; PAM sequence: CTC
  source 1..20: mol_type = other DNA
catgaggcagggccacttct

SEQ ID NO: 15029 - DNA, 20 bp, synthetic construct
  misc_feature 1..20: note = Description of Artificial Sequence: Synthetic oligonucleotide
  misc_feature 1..20: note = Target: ANGPTL4; (-) strand; PAM type: YTN; PAM sequence: CTG
  source 1..20: mol_type = other DNA
gagtgggagaggccactcca

SEQ ID NO: 15030 - DNA, 20 bp, synthetic construct
  misc_feature 1..20: note = Description of Artificial Sequence: Synthetic oligonucleotide
  misc_feature 1..20: note = Target: ANGPTL4; (-) strand; PAM type: YTN; PAM sequence: CTC
  source 1..20: mol_type = other DNA
gcctggagtgggagaggcca

SEQ ID NO: 15031 - DNA, 20 bp, synthetic construct
  misc_feature 1..20: note = Description of Artificial Sequence: Synthetic oligonucleotide
  misc_feature 1..20: note = Target: ANGPTL4; (-) strand; PAM type: YTN; PAM sequence: CTC
  source 1..20: mol_type = other DNA
cagacccagccagaactcgc

SEQ ID NO: 15032 - DNA, 20 bp, synthetic construct
  misc_feature 1..20: note = Description of Artificial Sequence: Synthetic oligonucleotide
  misc_feature 1..20: note = Target: ANGPTL4; (-) strand; PAM type: YTN; PAM sequence: TTC
  source 1..20: mol_type = other DNA
tccagacccagccagaactc

SEQ ID NO: 15033 - DNA, 20 bp, synthetic construct
  misc_feature 1..20: note = Description of Artificial Sequence: Synthetic oligonucleotide
  misc_feature 1..20: note = Target: ANGPTL4; (-) strand; PAM type: YTN; PAM sequence: CTT
  source 1..20: mol_type = other DNA
ctccagacccagccagaact

SEQ ID NO: 15034 - DNA, 20 bp, synthetic construct
  misc_feature 1..20: note = Description of Artificial Sequence: Synthetic oligonucleotide
  misc_feature 1..20: note = Target: ANGPTL4; (-) strand; PAM type: YTN; PAM sequence: CTA
  source 1..20: mol_type = other DNA
tgcaccttctccagacccag

SEQ ID NO: 15035 - DNA, 20 bp, synthetic construct
  misc_feature 1..20: note = Description of Artificial Sequence: Synthetic oligonucleotide
  misc_feature 1..20: note = Target: ANGPTL4; (-) strand; PAM type: YTN; PAM sequence: TTG
  source 1..20: mol_type = other DNA
cggtcccccgtgatgctatg

SEQ ID NO: 15036 - DNA, 20 bp, synthetic construct
  misc_feature 1..20: note = Description of Artificial Sequence: Synthetic oligonucleotide
  misc_feature 1..20: note = Target: ANGPTL4; (-) strand; PAM type: YTN; PAM sequence: CTG
  source 1..20: mol_type = other DNA
ttgcggtcccccgtgatgct

SEQ ID NO: 15037 - DNA, 20 bp, synthetic construct
  misc_feature 1..20: note = Description of Artificial Sequence: Synthetic oligonucleotide
  misc_feature 1..20: note = Target: ANGPTL4; (-) strand; PAM type: YTN; PAM sequence: CTG
  source 1..20: mol_type = other DNA
cacggccaggcggctgttgc

SEQ ID NO: 15038 - DNA, 20 bp, synthetic construct
  misc_feature 1..20: note = Description of Artificial Sequence: Synthetic oligonucleotide
  misc_feature 1..20: note = Target: ANGPTL4; (-) strand; PAM type: YTN; PAM sequence: TTG
  source 1..20: mol_type = other DNA
ccatcccagtcccgcagctg

SEQ ID NO: 15039 - DNA, 20 bp, synthetic construct
  misc_feature 1..20: note = Description of Artificial Sequence: Synthetic oligonucleotide
  misc_feature 1..20: note = Target: ANGPTL4; (-) strand; PAM type: YTN; PAM sequence: CTC
  source 1..20: mol_type = other DNA
ggcgttgccatcccagtccc

SEQ ID NO: 15040 - DNA, 20 bp, synthetic construct
  misc_feature 1..20: note = Description of Artificial Sequence: Synthetic oligonucleotide
  misc_feature 1..20: note = Target: ANGPTL4; (-) strand; PAM type: YTN; PAM sequence: CTG
  source 1..20: mol_type = other DNA
cagcaactcggcgttgccat

SEQ ID NO: 15041 - DNA, 20 bp, synthetic construct
  misc_feature 1..20: note = Description of Artificial Sequence: Synthetic oligonucleotide
  misc_feature 1..20: note = Target: ANGPTL4; (-) strand; PAM type: YTN; PAM sequence: CTC
  source 1..20: mol_type = other DNA
gccacccaggtgcacggaga

SEQ ID NO: 15042 - DNA, 20 bp, synthetic construct
  misc_feature 1..20: note = Description of Artificial Sequence: Synthetic oligonucleotide
  misc_feature 1..20: note = Target: ANGPTL4; (-) strand; PAM type: YTN; PAM sequence: CTA
  source 1..20: mol_type = other DNA
taggccgtgtcctcgccacc

SEQ ID NO: 15043 - DNA, 20 bp, synthetic construct
  misc_feature 1..20: note = Description of Artificial Sequence: Synthetic oligonucleotide
  misc_feature 1..20: note = Target: ANGPTL4; (-) strand; PAM type: YTN; PAM sequence: CTG
  source 1..20: mol_type = other DNA
caggctataggccgtgtcct

SEQ ID NO: 15044 - DNA, 20 bp, synthetic construct
  misc_feature 1..20: note = Description of Artificial Sequence: Synthetic oligonucleotide
  misc_feature 1..20: note = Target: ANGPTL4; (-) strand; PAM type: YTN; PAM sequence: CTG
  source 1..20: mol_type = other DNA
gccggccacgggtgcagtga

SEQ ID NO: 15045 - DNA, 20 bp, synthetic construct
  misc_feature 1..20: note = Description of Artificial Sequence: Synthetic oligonucleotide
  misc_feature 1..20: note = Target: ANGPTL4; (-) strand; PAM type: YTN; PAM sequence: CTG
  source 1..20: mol_type = other DNA
ggtgggacggtggtggcgcc

SEQ ID NO: 15046 - DNA, 20 bp, synthetic construct
  misc_feature 1..20: note = Description of Artificial Sequence: Synthetic oligonucleotide
  misc_feature 1..20: note = Target: ANGPTL4; (-) strand; PAM type: YTN; PAM sequence: CTG
  source 1..20: mol_type = other DNA
gtcccaagtggagaagggta

SEQ ID NO: 15047 - DNA, 20 bp, synthetic construct
  misc_feature 1..20: note = Description of Artificial Sequence: Synthetic oligonucleotide
  misc_feature 1..20: note = Target: ANGPTL4; (-) strand; PAM type: YTN; PAM sequence: CTG
  source 1..20: mol_type = other DNA
cggaggtcgtgatcctggtc

SEQ ID NO: 15048 - DNA, 20 bp, synthetic construct
  misc_feature 1..20: note = Description of Artificial Sequence: Synthetic oligonucleotide
  misc_feature 1..20: note = Target: ANGPTL4; (-) strand; PAM type: YTN; PAM sequence: TTG
  source 1..20: mol_type = other DNA
tccctgcggaggtcgtgatc

SEQ ID NO: 15049 - DNA, 20 bp, synthetic construct
  misc_feature 1..20: note = Description of Artificial Sequence: Synthetic oligonucleotide
  misc_feature 1..20: note = Target: ANGPTL4; (-) strand; PAM type: YTN; PAM sequence: CTT
  source 1..20: mol_type = other DNA
gtccctgcggaggtcgtgat

SEQ ID NO: 15050 - DNA, 20 bp, synthetic construct
  misc_feature 1..20: note = Description of Artificial Sequence: Synthetic oligonucleotide
  misc_feature 1..20: note = Target: ANGPTL4; (-) strand; PAM type: YTN; PAM sequence: TTC
  source 1..20: mol_type = other DNA
ttgtccctgcggaggtcgtg

SEQ ID NO: 15051 - DNA, 20 bp, synthetic construct
  misc_feature 1..20: note = Description of Artificial Sequence: Synthetic oligonucleotide
  misc_feature 1..20: note = Target: ANGPTL4; (-) strand; PAM type: YTN; PAM sequence: TTG
  source 1..20: mol_type = other DNA
gcgcagttcttgtccctgcg

SEQ ID NO: 15052 - DNA, 20 bp, synthetic construct
  misc_feature 1..20: note = Description of Artificial Sequence: Synthetic oligonucleotide
  misc_feature 1..20: note = Target: ANGPTL4; (-) strand; PAM type: YTN; PAM sequence: CTT
  source 1..20: mol_type = other DNA
ggcgcagttcttgtccctgc

SEQ ID NO: 15053 - DNA, 20 bp, synthetic construct
  misc_feature 1..20: note = Description of Artificial Sequence: Synthetic oligonucleotide
  misc_feature 1..20: note = Target: ANGPTL4; (-) strand; PAM type: YTN; PAM sequence: CTC
  source 1..20: mol_type = other DNA
ttggcgcagttcttgtccct

SEQ ID NO: 15054 - DNA, 20 bp, synthetic construct
  misc_feature 1..20: note = Description of Artificial Sequence: Synthetic oligonucleotide
  misc_feature 1..20: note = Target: ANGPTL4; (-) strand; PAM type: YTN; PAM sequence: CTC
  source 1..20: mol_type = other DNA
accagagaggctcttggcgc

SEQ ID NO: 15055 - DNA, 20 bp, synthetic construct
  misc_feature 1..20: note = Description of Artificial Sequence: Synthetic oligonucleotide
  misc_feature 1..20: note = Target: ANGPTL4; (-) strand; PAM type: YTN; PAM sequence: CTG
  source 1..20: mol_type = other DNA
ctcaccagagaggctcttgg

SEQ ID NO: 15056 - DNA, 20 bp, synthetic construct
  misc_feature 1..20: note = Description of Artificial Sequence: Synthetic oligonucleotide
  misc_feature 1..20: note = Target: ANGPTL4; (-) strand; PAM type: YTN; PAM sequence: CTG
  source 1..20: mol_type = other DNA
ggtgtggcatggcagggcct

SEQ ID NO: 15057 - DNA, 20 bp, synthetic construct
  misc_feature 1..20: note = Description of Artificial Sequence: Synthetic oligonucleotide
  misc_feature 1..20: note = Target: ANGPTL4; (-) strand; PAM type: YTN; PAM sequence: CTG
  source 1..20: mol_type = other DNA
gctgggtgtggcatggcagg

SEQ ID NO: 15058 - DNA, 20 bp, synthetic construct
  misc_feature 1..20: note = Description of Artificial Sequence: Synthetic oligonucleotide
  misc_feature 1..20: note = Target: ANGPTL4; (-) strand; PAM type: YTN; PAM sequence: CTG
  source 1..20: mol_type = other DNA
ctggctgggtgtggcatggc

SEQ ID NO: 15059 - DNA, 20 bp, synthetic construct
  misc_feature 1..20: note = Description of Artificial Sequence: Synthetic oligonucleotide
  misc_feature 1..20: note = Target: ANGPTL4; (-) strand; PAM type: YTN; PAM sequence: TTG
  source 1..20: mol_type = other DNA
aaggcaggacagagcagcag

SEQ ID NO: 15060 - DNA, 20 bp, synthetic construct
  misc_feature 1..20: note = Description of Artificial Sequence: Synthetic oligonucleotide
  misc_feature 1..20: note = Target: ANGPTL4; (-) strand; PAM type: YTN; PAM sequence: TTA
  source 1..20: mol_type = other DNA
gtggcccaatcacacacacg

SEQ ID NO: 15061 - DNA, 20 bp, synthetic construct
  misc_feature 1..20: note = Description of Artificial Sequence: Synthetic oligonucleotide
  misc_feature 1..20: note = Target: ANGPTL4; (-) strand; PAM type: YTN; PAM sequence: CTA
  source 1..20: mol_type = other DNA
agttagtggcccaatcacac

SEQ ID NO: 15062 - DNA, 20 bp, synthetic construct
  misc_feature 1..20: note = Description of Artificial Sequence: Synthetic oligonucleotide
  misc_feature 1..20: note = Target: ANGPTL4; (-) strand; PAM type: YTN; PAM sequence: CTG
  source 1..20: mol_type = other DNA
aggccagataggctaagtta

SEQ ID NO: 15063 - DNA, 20 bp, synthetic construct
  misc_feature 1..20: note = Description of Artificial Sequence: Synthetic oligonucleotide
  misc_feature 1..20: note = Target: ANGPTL4; (-) strand; PAM type: YTN; PAM sequence: TTC
  source 1..20: mol_type = other DNA
aggatgggaaaactgaggcc

SEQ ID NO: 15064 - DNA, 20 bp, synthetic construct
  misc_feature 1..20: note = Description of Artificial Sequence: Synthetic oligonucleotide
  misc_feature 1..20: note = Target: ANGPTL4; (-) strand; PAM type: YTN; PAM sequence: TTT
  source 1..20: mol_type = other DNA
caggatgggaaaactgaggc

SEQ ID NO: 15065 - DNA, 20 bp, synthetic construct
  misc_feature 1..20: note = Description of Artificial Sequence: Synthetic oligonucleotide
  misc_feature 1..20: note = Target: ANGPTL4; (-) strand; PAM type: YTN; PAM sequence: TTT
  source 1..20: mol_type = other DNA
tcaggatgggaaaactgagg

SEQ ID NO: 15066 - DNA, 20 bp, synthetic construct
  misc_feature 1..20: note = Description of Artificial Sequence: Synthetic oligonucleotide
  misc_feature 1..20: note = Target: ANGPTL4; (-) strand; PAM type: YTN; PAM sequence: CTT
  source 1..20: mol_type = other DNA
ttcaggatgggaaaactgag

SEQ ID NO: 15067 - DNA, 20 bp, synthetic construct
  misc_feature 1..20: note = Description of Artificial Sequence: Synthetic oligonucleotide
  misc_feature 1..20: note = Target: ANGPTL4; (-) strand; PAM type: YTN; PAM sequence: CTC
  source 1..20: mol_type = other DNA
aaaaaataaatacataaata

SEQ ID NO: 15068 - DNA, 20 bp, synthetic construct
  misc_feature 1..20: note = Description of Artificial Sequence: Synthetic oligonucleotide
  misc_feature 1..20: note = Target: ANGPTL4; (-) strand; PAM type: YTN; PAM sequence: CTC
  source 1..20: mol_type = other DNA
cgtctcaaaaaataaataca

SEQ ID NO: 15069 - DNA, 20 bp, synthetic construct
  misc_feature 1..20: note = Description of Artificial Sequence: Synthetic oligonucleotide
  misc_feature 1..20: note = Target: ANGPTL4; (-) strand; PAM type: YTN; PAM sequence: CTG
  source 1..20: mol_type = other DNA
ggtgacaaagtgagactccg

SEQ ID NO: 15070 - DNA, 20 bp, synthetic construct
  misc_feature 1..20: note = Description of Artificial Sequence: Synthetic oligonucleotide
  misc_feature 1..20: note = Target: ANGPTL4; (-) strand; PAM type: YTN; PAM sequence: CTC
  source 1..20: mol_type = other DNA
cagcctgggtgacaaagtga

SEQ ID NO: 15071 - DNA, 20 bp, synthetic construct
  misc_feature 1..20: note = Description of Artificial Sequence: Synthetic oligonucleotide
  misc_feature 1..20: note = Target: ANGPTL4; (-) strand; PAM type: YTN; PAM sequence: TTG
  source 1..20: mol_type = other DNA
cagtgagccaagatcgtgcc

SEQ ID NO: 15072 - DNA, 20 bp, synthetic construct
  misc_feature 1..20: note = Description of Artificial Sequence: Synthetic oligonucleotide
  misc_feature 1..20: note = Target: ANGPTL4; (-) strand; PAM type: YTN; PAM sequence: CTT
  source 1..20: mol_type = other DNA
gcagtgagccaagatcgtgc

SEQ ID NO: 15073 - DNA, 20 bp, synthetic construct
  misc_feature 1..20: note = Description of Artificial Sequence: Synthetic oligonucleotide
  misc_feature 1..20: note = Target: ANGPTL4; (-) strand; PAM type: YTN; PAM sequence: CTC
  source 1..20: mol_type = other DNA
aggaggtggagcttgcagtg

SEQ ID NO: 15074 - DNA, 20 bp, synthetic construct
  misc_feature 1..20: note = Description of Artificial Sequence: Synthetic oligonucleotide
  misc_feature 1..20: note = Target: ANGPTL4; (-) strand; PAM type: YTN; PAM sequence: CTG
  source 1..20: mol_type = other DNA
aggcaggagaatggtgtgaa

SEQ ID NO: 15075 - DNA, 20 bp, synthetic construct
  misc_feature 1..20: note = Description of Artificial Sequence: Synthetic oligonucleotide
  misc_feature 1..20: note = Target: ANGPTL4; (-) strand; PAM type: YTN; PAM sequence: CTC
  source 1..20: mol_type = other DNA
gggaggctgaggcaggagaa

SEQ ID NO: 15076 - DNA, 20 bp, synthetic construct
  misc_feature 1..20: note = Description of Artificial Sequence: Synthetic oligonucleotide
  misc_feature 1..20: note = Target: ANGPTL4; (-) strand; PAM type: YTN; PAM sequence: CTA
  source 1..20: mol_type = other DNA
ctcgggaggctgaggcagga

SEQ ID NO: 15077 - DNA, 20 bp, synthetic construct
  misc_feature 1..20: note = Description of Artificial Sequence: Synthetic oligonucleotide
  misc_feature 1..20: note = Target: ANGPTL4; (-) strand; PAM type: YTN; PAM sequence: CTA
  source 1..20: mol_type = other DNA
tagtcccagctactcgggag

SEQ ID NO: 15078 - DNA, 20 bp, synthetic construct
  misc_feature 1..20: note = Description of Artificial Sequence: Synthetic oligonucleotide
  misc_feature 1..20: note = Target: ANGPTL4; (-) strand; PAM type: YTN; PAM sequence: TTA
  source 1..20: mol_type = other DNA
gccaggcgtggtggtgggca

SEQ ID NO: 15079 - DNA, 20 bp, synthetic construct
  misc_feature 1..20: note = Description of Artificial Sequence: Synthetic oligonucleotide
  misc_feature 1..20: note = Target: ANGPTL4; (-) strand; PAM type: YTN; PAM sequence: CTA
  source 1..20: mol_type = other DNA
aaaatacaaaaaaattagcc

SEQ ID NO: 15080 - DNA, 20 bp, synthetic construct
  misc_feature 1..20: note = Description of Artificial Sequence: Synthetic oligonucleotide
  misc_feature 1..20: note = Target: ANGPTL4; (-) strand; PAM type: YTN; PAM sequence: CTA
  source 1..20: mol_type = other DNA
ctaaaaatacaaaaaaatta

SEQ ID NO: 15081 - DNA, 20 bp, synthetic construct
  misc_feature 1..20: note = Description of Artificial Sequence: Synthetic oligonucleotide
  misc_feature 1..20: note = Target: ANGPTL4; (-) strand; PAM type: YTN; PAM sequence: CTC
  source 1..20: mol_type = other DNA
tactaaaaatacaaaaaaat

SEQ ID NO: 15082 - DNA, 20 bp, synthetic construct
  misc_feature 1..20: note = Description of Artificial Sequence: Synthetic oligonucleotide
  misc_feature 1..20: note = Target: ANGPTL4; (-) strand; PAM type: YTN; PAM sequence: CTA
  source 1..20: mol_type = other DNA
acacggtgaaaccccatctc

SEQ ID NO: 15083 - DNA, 20 bp, synthetic construct
  misc_feature 1..20: note = Description of Artificial Sequence: Synthetic oligonucleotide
  misc_feature 1..20: note = Target: ANGPTL4; (-) strand; PAM type: YTN; PAM sequence: CTG
  source 1..20: mol_type = other DNA
gctaacacggtgaaacccca

SEQ ID NO: 15084 - DNA, 20 bp, synthetic construct
  misc_feature 1..20: note = Description of Artificial Sequence: Synthetic oligonucleotide
  misc_feature 1..20: note = Target: ANGPTL4; (-) strand; PAM type: YTN; PAM sequence: CTG
  source 1..20: mol_type = other DNA
aggcaggcagatcacgaggt

SEQ ID NO: 15085 - DNA, 20 bp, synthetic construct
  misc_feature 1..20: note = Description of Artificial Sequence: Synthetic oligonucleotide
  misc_feature 1..20: note = Target: ANGPTL4; (-) strand; PAM type: YTN; PAM sequence: TTG
  source 1..20: mol_type = other DNA
ggaggctgaggcaggcagat

SEQ ID NO: 15086 - DNA, 20 bp, synthetic construct
  misc_feature 1..20: note = Description of Artificial Sequence: Synthetic oligonucleotide
  misc_feature 1..20: note = Target: ANGPTL4; (-) strand; PAM type: YTN; PAM sequence: TTT
  source 1..20: mol_type = other DNA
gggaggctgaggcaggcaga

SEQ ID NO: 15087 - DNA, 20 bp, synthetic construct
  misc_feature 1..20: note = Description of Artificial Sequence: Synthetic oligonucleotide
  misc_feature 1..20: note = Target: ANGPTL4; (-) strand; PAM type: YTN; PAM sequence: CTT
  source 1..20: mol_type = other DNA
tgggaggctgaggcaggcag

SEQ ID NO: 15088 - DNA, 20 bp, synthetic construct
  misc_feature 1..20: note = Description of Artificial Sequence: Synthetic oligonucleotide
  misc_feature 1..20: note = Target: ANGPTL4; (-) strand; PAM type: YTN; PAM sequence: CTG
  source 1..20: mol_type = other DNA
taatcccagcactttgggag

SEQ ID NO: 15089 - DNA, 20 bp, synthetic construct
  misc_feature 1..20: note = Description of Artificial Sequence: Synthetic oligonucleotide
  misc_feature 1..20: note = Target: ANGPTL4; (-) strand; PAM type: YTN; PAM sequence: CTC
  source 1..20: mol_type = other DNA
acgcctgtaatcccagcact

SEQ ID NO: 15090 - DNA, 20 bp, synthetic construct
  misc_feature 1..20: note = Description of Artificial Sequence: Synthetic oligonucleotide
  misc_feature 1..20: note = Target: ANGPTL4; (-) strand; PAM type: YTN; PAM sequence: CTC
  source 1..20: mol_type = other DNA
aaaaaataaataagtaggcc

SEQ ID NO: 15091 - DNA, 20 bp, synthetic construct
  misc_feature 1..20: note = Description of Artificial Sequence: Synthetic oligonucleotide
  misc_feature 1..20: note = Target: ANGPTL4; (-) strand; PAM type: YTN; PAM sequence: CTG
  source 1..20: mol_type = other DNA
tctcaaaaaataaataagta

SEQ ID NO: 15092 - DNA, 20 bp, synthetic construct
  misc_feature 1..20: note = Description of Artificial Sequence: Synthetic oligonucleotide
  misc_feature 1..20: note = Target: ANGPTL4; (-) strand; PAM type: YTN; PAM sequence: CTC
  source 1..20: mol_type = other DNA
tgtctcaaaaaataaataag

SEQ ID NO: 15093 - DNA, 20 bp, synthetic construct
  misc_feature 1..20: note = Description of Artificial Sequence: Synthetic oligonucleotide
  misc_feature 1..20: note = Target: ANGPTL4; (-) strand; PAM type: YTN; PAM sequence: CTG
  source 1..20: mol_type = other DNA
ggagacacagcgggactctg

SEQ ID NO: 15094 - DNA, 20 bp, synthetic construct
  misc_feature 1..20: note = Description of Artificial Sequence: Synthetic oligonucleotide
  misc_feature 1..20: note = Target: ANGPTL4; (-) strand; PAM type: YTN; PAM sequence: CTC
  source 1..20: mol_type = other DNA
cagcctgggagacacagcgg

SEQ ID NO: 15095 - DNA, 20 bp, synthetic construct
  misc_feature 1..20: note = Description of Artificial Sequence: Synthetic oligonucleotide
  misc_feature 1..20: note = Target: ANGPTL4; (-) strand; PAM type: YTN; PAM sequence: TTG
  source 1..20: mol_type = other DNA
cactccagcctgggagacac

SEQ ID NO: 15096 - DNA, 20 bp, synthetic construct
  misc_feature 1..20: note = Description of Artificial Sequence: Synthetic oligonucleotide
  misc_feature 1..20: note = Target: ANGPTL4; (-) strand; PAM type: YTN; PAM sequence: CTT
  source 1..20: mol_type = other DNA
gcactccagcctgggagaca

SEQ ID NO: 15097 - DNA, 20 bp, synthetic construct
  misc_feature 1..20: note = Description of Artificial Sequence: Synthetic oligonucleotide
  misc_feature 1..20: note = Target: ANGPTL4; (-) strand; PAM type: YTN; PAM sequence: CTG
  source 1..20: mol_type = other DNA
cagtgagccaagatcacgtc

SEQ ID NO: 15098 - DNA, 20 bp, synthetic construct
  misc_feature 1..20: note = Description of Artificial Sequence: Synthetic oligonucleotide
  misc_feature 1..20: note = Target: ANGPTL4; (-) strand; PAM type: YTN; PAM sequence: TTG
  source 1..20: mol_type = other DNA
aacccaggaggcggaggctg

SEQ ID NO: 15099 - DNA, 20 bp, synthetic construct
  misc_feature 1..20: note = Description of Artificial Sequence: Synthetic oligonucleotide
  misc_feature 1..20: note = Target: ANGPTL4; (-) strand; PAM type: YTN; PAM sequence: CTT
  source 1..20: mol_type = other DNA
gaacccaggaggcggaggct

SEQ ID NO: 15100 - DNA, 20 bp, synthetic construct
  misc_feature 1..20: note = Description of Artificial Sequence: Synthetic oligonucleotide
  misc_feature 1..20: note = Target: ANGPTL4; (-) strand; PAM type: YTN; PAM sequence: CTG
  source 1..20: mol_type = other DNA
aggcaggagaatcacttgaa

SEQ ID NO: 15101 - DNA, 20 bp, synthetic construct
  misc_feature 1..20: note = Description of Artificial Sequence: Synthetic oligonucleotide
  misc_feature 1..20: note = Target: ANGPTL4; (-) strand; PAM type: YTN; PAM sequence: CTC
  source 1..20: mol_type = other DNA
aggaggctgaggcaggagaa

SEQ ID NO: 15102 - DNA, 20 bp, synthetic construct
  misc_feature 1..20: note = Description of Artificial Sequence: Synthetic oligonucleotide
  misc_feature 1..20: note = Target: ANGPTL4; (-) strand; PAM type: YTN; PAM sequence: CTA
  source 1..20: mol_type = other DNA
ctcaggaggctgaggcagga

SEQ ID NO: 15103 - DNA, 20 bp, synthetic construct
  misc_feature 1..20: note = Description of Artificial Sequence: Synthetic oligonucleotide
  misc_feature 1..20: note = Target: ANGPTL4; (-) strand; PAM type: YTN; PAM sequence: CTG
  source 1..20: mol_type = other DNA
taatcccagctactcaggag

SEQ ID NO: 15104 - DNA, 20 bp, synthetic construct
  misc_feature 1..20: note = Description of Artificial Sequence: Synthetic oligonucleotide
  misc_feature 1..20: note = Target: ANGPTL4; (-) strand; PAM type: YTN; PAM sequence: CTG
  source 1..20: mol_type = other DNA
tgcatggtggcgggaacctg

SEQ ID NO: 15105 - DNA, 20 bp, synthetic construct
  misc_feature 1..20: note = Description of Artificial Sequence: Synthetic oligonucleotide
  misc_feature 1..20: note = Target: ANGPTL4; (-) strand; PAM type: YTN; PAM sequence: TTA
  source 1..20: mol_type = other DNA
tctgtgcatggtggcgggaa

SEQ ID NO: 15106 - DNA, 20 bp, synthetic construct
  misc_feature 1..20: note = Description of Artificial Sequence: Synthetic oligonucleotide
  misc_feature 1..20: note = Target: ANGPTL4; (-) strand; PAM type: YTN; PAM sequence: CTA
  source 1..20: mol_type = other DNA
aaaatacaaaacaattatct

SEQ ID NO: 15107 - DNA, 20 bp, synthetic construct
  misc_feature 1..20: note = Description of Artificial Sequence: Synthetic oligonucleotide
  misc_feature 1..20: note = Target: ANGPTL4; (-) strand; PAM type: YTN; PAM sequence: CTA
  source 1..20: mol_type = other DNA
ctaaaaatacaaaacaatta

SEQ ID NO: 15108 - DNA, 20 bp, synthetic construct
  misc_feature 1..20: note = Description of Artificial Sequence: Synthetic oligonucleotide
  misc_feature 1..20: note = Target: ANGPTL4; (-) strand; PAM type: YTN; PAM sequence: CTC
  source 1..20: mol_type = other DNA
tactaaaaatacaaaacaat

SEQ ID NO: 15109 - DNA, 20 bp, synthetic construct
  misc_feature 1..20: note = Description of Artificial Sequence: Synthetic oligonucleotide
  misc_feature 1..20: note = Target: ANGPTL4; (-) strand; PAM type: YTN; PAM sequence: CTG
  source 1..20: mol_type = other DNA
gccaacatggtgaaaccccg

SEQ ID NO: 15110 - DNA, 20 bp, synthetic construct
  misc_feature 1..20: note = Description of Artificial Sequence: Synthetic oligonucleotide
  misc_feature 1..20: note = Target: ANGPTL4; (-) strand; PAM type: YTN; PAM sequence: TTC
  source 1..20: mol_type = other DNA
aagaccaccctggccaacat

SEQ ID NO: 15111 - DNA, 20 bp, synthetic construct
  misc_feature 1..20: note = Description of Artificial Sequence: Synthetic oligonucleotide
  misc_feature 1..20: note = Target: ANGPTL4; (-) strand; PAM type: YTN; PAM sequence: TTG
  source 1..20: mol_type = other DNA
aggtcaggagttcaagacca

SEQ ID NO: 15112 - DNA, 20 bp, synthetic construct
  misc_feature 1..20: note = Description of Artificial Sequence: Synthetic oligonucleotide
  misc_feature 1..20: note = Target: ANGPTL4; (-) strand; PAM type: YTN; PAM sequence: CTT
  source 1..20: mol_type = other DNA
gaggtcaggagttcaagacc

SEQ ID NO: 15113 - DNA, 20 bp, synthetic construct
  misc_feature 1..20: note = Description of Artificial Sequence: Synthetic oligonucleotide
  misc_feature 1..20: note = Target: ANGPTL4; (-) strand; PAM type: YTN; PAM sequence: TTG
  source 1..20: mol_type = other DNA
ggaggccgaggtgggcagat

SEQ ID NO: 15114 - DNA, 20 bp, synthetic construct
  misc_feature 1..20: note = Description of Artificial Sequence: Synthetic oligonucleotide
  misc_feature 1..20: note = Target: ANGPTL4; (-) strand; PAM type: YTN; PAM sequence: TTT
  source 1..20: mol_type = other DNA
gggaggccgaggtgggcaga

SEQ ID NO: 15115 - DNA, 20 bp, synthetic construct
  misc_feature 1..20: note = Description of Artificial Sequence: Synthetic oligonucleotide
  misc_feature 1..20: note = Target: ANGPTL4; (-) strand; PAM type: YTN; PAM sequence: CTT
  source 1..20: mol_type = other DNA
tgggaggccgaggtgggcag

SEQ ID NO: 15116 - DNA, 20 bp, synthetic construct
  misc_feature 1..20: note = Description of Artificial Sequence: Synthetic oligonucleotide
  misc_feature 1..20: note = Target: ANGPTL4; (-) strand; PAM type: YTN; PAM sequence: CTG
  source 1..20: mol_type = other DNA
taatcccaacactttgggag

SEQ ID NO: 15117 - DNA, 20 bp, synthetic construct
  misc_feature 1..20: note = Description of Artificial Sequence: Synthetic oligonucleotide
  misc_feature 1..20: note = Target: ANGPTL4; (-) strand; PAM type: YTN; PAM sequence: CTC
  source 1..20: mol_type = other DNA
acgcctgtaatcccaacact

SEQ ID NO: 15118 - DNA, 20 bp, synthetic construct
  misc_feature 1..20: note = Description of Artificial Sequence: Synthetic oligonucleotide
  misc_feature 1..20: note = Target: ANGPTL4; (-) strand; PAM type: YTN; PAM sequence: TTG
  source 1..20: mol_type = other DNA
tggctcacgcctgtaatccc

SEQ ID NO: 15119 - DNA, 20 bp, synthetic construct
  misc_feature 1..20: note = Description of Artificial Sequence: Synthetic oligonucleotide
  misc_feature 1..20: note = Target: ANGPTL4; (-) strand; PAM type: YTN; PAM sequence: TTG
  source 1..20: mol_type = other DNA
tggccgggtattgtggctca

SEQ ID NO: 15120 - DNA, 20 bp, synthetic construct
  misc_feature 1..20: note = Description of Artificial Sequence: Synthetic oligonucleotide
  misc_feature 1..20: note = Target: ANGPTL4; (-) strand; PAM type: YTN; PAM sequence: TTT
  source 1..20: mol_type = other DNA
gtggccgggtattgtggctc

SEQ ID NO: 15121 - DNA, 20 bp, synthetic construct
  misc_feature 1..20: note = Description of Artificial Sequence: Synthetic oligonucleotide
  misc_feature 1..20: note = Target: ANGPTL4; (-) strand; PAM type: YTN; PAM sequence: TTA
  source 1..20: mol_type = other DNA
taaagatgtttgtggccggg

SEQ ID NO: 15122 - DNA, 20 bp, synthetic construct
  misc_feature 1..20: note = Description of Artificial Sequence: Synthetic oligonucleotide
  misc_feature 1..20: note = Target: ANGPTL4; (-) strand; PAM type: YTN; PAM sequence: CTG
  source 1..20: mol_type = other DNA
tggagcaccattataaagat

SEQ ID NO: 15123 - DNA, 20 bp, synthetic construct
  misc_feature 1..20: note = Description of Artificial Sequence: Synthetic oligonucleotide
  misc_feature 1..20: note = Target: ANGPTL4; (-) strand; PAM type: YTN; PAM sequence: TTC
  source 1..20: mol_type = other DNA
aaaaaaaaaaaaaaaaaaag

SEQ ID NO: 15124 - DNA, 20 bp, synthetic construct
  misc_feature 1..20: note = Description of Artificial Sequence: Synthetic oligonucleotide
  misc_feature 1..20: note = Target: ANGPTL4; (-) strand; PAM type: YTN; PAM sequence: TTT
  source 1..20: mol_type = other DNA
caaaaaaaaaaaaaaaaaaa

SEQ ID NO: 15125 - DNA, 20 bp, synthetic construct
  misc_feature 1..20: note = Description of Artificial Sequence: Synthetic oligonucleotide
  misc_feature 1..20: note = Target: ANGPTL4; (-) strand; PAM type: YTN; PAM sequence: CTG
  source 1..20: mol_type = other DNA
tttcaaaaaaaaaaaaaaaa

SEQ ID NO: 15126 - DNA, 20 bp, synthetic construct
  misc_feature 1..20: note = Description of Artificial Sequence: Synthetic oligonucleotide
  misc_feature 1..20: note = Target: ANGPTL4; (-) strand; PAM type: YTN; PAM sequence: TTA
  source 1..20: mol_type = other DNA
ggcaacagagtgagaccctg

SEQ ID NO: 15127 - DNA, 20 bp, synthetic construct
  misc_feature 1..20: note = Description of Artificial Sequence: Synthetic oligonucleotide
  misc_feature 1..20: note = Target: ANGPTL4; (-) strand; PAM type: YTN; PAM sequence: CTT
  source 1..20: mol_type = other DNA
aggcaacagagtgagaccct

SEQ ID NO: 15128 - DNA, 20 bp, synthetic construct
  misc_feature 1..20: note = Description of Artificial Sequence: Synthetic oligonucleotide
  misc_feature 1..20: note = Target: ANGPTL4; (-) strand; PAM type: YTN; PAM sequence: CTC
  source 1..20: mol_type = other DNA
cagcttaggcaacagagtga

SEQ ID NO: 15129 - DNA, 20 bp, synthetic construct
  misc_feature 1..20: note = Description of Artificial Sequence: Synthetic oligonucleotide
  misc_feature 1..20: note = Target: ANGPTL4; (-) strand; PAM type: YTN; PAM sequence: CTG
  source 1..20: mol_type = other DNA
cactccagcttaggcaacag

SEQ ID NO: 15130 - DNA, 20 bp, synthetic construct
  misc_feature 1..20: note = Description of Artificial Sequence: Synthetic oligonucleotide
  misc_feature 1..20: note = Target: ANGPTL4; (-) strand; PAM type: YTN; PAM sequence: TTG
  source 1..20: mol_type = other DNA
cagtgagccgagatcgcacc

SEQ ID NO: 15131 - DNA, 20 bp, synthetic construct
  misc_feature 1..20: note = Description of Artificial Sequence: Synthetic oligonucleotide
  misc_feature 1..20: note = Target: ANGPTL4; (-) strand; PAM type: YTN; PAM sequence: TTG
  source 1..20: mol_type = other DNA
aacccgggaggtggaggttg

SEQ ID NO: 15132 - DNA, 20 bp, synthetic construct
  misc_feature 1..20: note = Description of Artificial Sequence: Synthetic oligonucleotide
  misc_feature 1..20: note = Target: ANGPTL4; (-) strand; PAM type: YTN; PAM sequence: CTT
  source 1..20: mol_type = other DNA
gaacccgggaggtggaggtt

SEQ ID NO: 15133 - DNA, 20 bp, synthetic construct
  misc_feature 1..20: note = Description of Artificial Sequence: Synthetic oligonucleotide
  misc_feature 1..20: note = Target: ANGPTL4; (-) strand; PAM type: YTN; PAM sequence: TTG
  source 1..20: mol_type = other DNA
cttgaacccgggaggtggag

SEQ ID NO: 15134 - DNA, 20 bp, synthetic construct
  misc_feature 1..20: note = Description of Artificial Sequence: Synthetic oligonucleotide
  misc_feature 1..20: note = Target: ANGPTL4; (-) strand; PAM type: YTN; PAM sequence: TTG
  source 1..20: mol_type = other DNA
agaattgcttgaacccggga

SEQ ID NO: 15135 - DNA, 20 bp, synthetic construct
  misc_feature 1..20: note = Description of Artificial Sequence: Synthetic oligonucleotide
  misc_feature 1..20: note = Target: ANGPTL4; (-) strand; PAM type: YTN; PAM sequence: TTT
  source 1..20: mol_type = other DNA
gagaattgcttgaacccggg

SEQ ID NO: 15136 - DNA, 20 bp, synthetic construct
  misc_feature 1..20: note = Description of Artificial Sequence: Synthetic oligonucleotide
  misc_feature 1..20: note = Target: ANGPTL4; (-) strand; PAM type: YTN; PAM sequence: TTT
  source 1..20: mol_type = other DNA
tgagaattgcttgaacccgg

SEQ ID NO: 15137 - DNA, 20 bp, synthetic construct
  misc_feature 1..20: note = Description of Artificial Sequence: Synthetic oligonucleotide
  misc_feature 1..20: note = Target: ANGPTL4; (-) strand; PAM type: YTN; PAM sequence: TTT
  source 1..20: mol_type = other DNA
ttgagaattgcttgaacccg

SEQ ID NO: 15138 - DNA, 20 bp, synthetic construct
  misc_feature 1..20: note = Description of Artificial Sequence: Synthetic oligonucleotide
  misc_feature 1..20: note = Target: ANGPTL4; (-) strand; PAM type: YTN; PAM sequence: TTT
  source 1..20: mol_type = other DNA
tttgagaattgcttgaaccc

SEQ ID NO: 15139 - DNA, 20 bp, synthetic construct
  misc_feature 1..20: note = Description of Artificial Sequence: Synthetic oligonucleotide
  misc_feature 1..20: note = Target: ANGPTL4; (-) strand; PAM type: YTN; PAM sequence: TTT
  source 1..20: mol_type = other DNA
ttttgagaattgcttgaacc

SEQ ID NO: 15140 - DNA, 20 bp, synthetic construct
  misc_feature 1..20: note = Description of Artificial Sequence: Synthetic oligonucleotide
  misc_feature 1..20: note = Target: ANGPTL4; (-) strand; PAM type: YTN; PAM sequence: TTT
  source 1..20: mol_type = other DNA
tttttgagaattgcttgaac

SEQ ID NO: 15141 - DNA, 20 bp, synthetic construct
  misc_feature 1..20: note = Description of Artificial Sequence: Synthetic oligonucleotide
  misc_feature 1..20: note = Target: ANGPTL4; (-) strand; PAM type: YTN; PAM sequence: TTT
  source 1..20: mol_type = other DNA
ttttttgagaattgcttgaa

SEQ ID NO: 15142 - DNA, 20 bp, synthetic construct
  misc_feature 1..20: note = Description of Artificial Sequence: Synthetic oligonucleotide
  misc_feature 1..20: note = Target: ANGPTL4; (-) strand; PAM type: YTN; PAM sequence: TTT
  source 1..20: mol_type = other DNA
tttttttgagaattgcttga

SEQ ID NO: 15143 - DNA, 20 bp, synthetic construct
  misc_feature 1..20: note = Description of Artificial Sequence: Synthetic oligonucleotide
  misc_feature 1..20: note = Target: ANGPTL4; (-) strand; PAM type: YTN; PAM sequence: TTT
  source 1..20: mol_type = other DNA
ttttttttgagaattgcttg

SEQ ID NO: 15144 - DNA, 20 bp, synthetic construct
  misc_feature 1..20: note = Description of Artificial Sequence: Synthetic oligonucleotide
  misc_feature 1..20: note = Target: ANGPTL4; (-) strand; PAM type: YTN; PAM sequence: TTT
  source 1..20: mol_type = other DNA
tttttttttgagaattgctt

SEQ ID NO: 15145 - DNA, 20 bp, synthetic construct
  misc_feature 1..20: note = Description of Artificial Sequence: Synthetic oligonucleotide
  misc_feature 1..20: note = Target: ANGPTL4; (-) strand; PAM type: YTN; PAM sequence: TTT
  source 1..20: mol_type = other DNA
ttttttttttgagaattgct

SEQ ID NO: 15146 - DNA, 20 bp, synthetic construct
  misc_feature 1..20: note = Description of Artificial Sequence: Synthetic oligonucleotide
  misc_feature 1..20: note = Target: ANGPTL4; (-) strand; PAM type: YTN; PAM sequence: TTT
  source 1..20: mol_type = other DNA
tttttttttttgagaattgc

SEQ ID NO: 15147 - DNA, 20 bp, synthetic construct
  misc_feature 1..20: note = Description of Artificial Sequence: Synthetic oligonucleotide
  misc_feature 1..20: note = Target: ANGPTL4; (-) strand; PAM type: YTN; PAM sequence: TTT
  source 1..20: mol_type = other DNA
ttttttttttttgagaattg

SEQ ID NO: 15148 - DNA, 20 bp, synthetic construct
  misc_feature 1..20: note = Description of Artificial Sequence: Synthetic oligonucleotide
  misc_feature 1..20: note = Target: ANGPTL4; (-) strand; PAM type: YTN; PAM sequence: CTA
  source 1..20: mol_type = other DNA
atttttttttttttttgaga

SEQ ID NO: 15149 - DNA, 20 bp, synthetic construct
  misc_feature 1..20: note = Description of Artificial Sequence: Synthetic oligonucleotide
  misc_feature 1..20: note = Target: ANGPTL4; (-) strand; PAM type: YTN; PAM sequence: TTG
  source 1..20: mol_type = other DNA
caagtgtgagccaccgtgcc

SEQ ID NO: 15150 - DNA, 20 bp, synthetic construct
  misc_feature 1..20: note = Description of Artificial Sequence: Synthetic oligonucleotide
  misc_feature 1..20: note = Target: ANGPTL4; (-) strand; PAM type: YTN; PAM sequence: CTG
  source 1..20: mol_type = other DNA
ggattgcaagtgtgagccac

SEQ ID NO: 15151 - DNA, 20 bp, synthetic construct
  misc_feature 1..20: note = Description of Artificial Sequence: Synthetic oligonucleotide
  misc_feature 1..20: note = Target: ANGPTL4; (-) strand; PAM type: YTN; PAM sequence: CTC
  source 1..20: mol_type = other DNA
ccaaagtgctgggattgcaa

SEQ ID NO: 15152 - DNA, 20 bp, synthetic construct
  misc_feature 1..20: note = Description of Artificial Sequence: Synthetic oligonucleotide
  misc_feature 1..20: note = Target: ANGPTL4; (-) strand; PAM type: YTN; PAM sequence: TTC
  source 1..20: mol_type = other DNA
agcctcccaaagtgctggga

SEQ ID NO: 15153 - DNA, 20 bp, synthetic construct
  misc_feature 1..20: note = Description of Artificial Sequence: Synthetic oligonucleotide
  misc_feature 1..20: note = Target: ANGPTL4; (-) strand; PAM type: YTN; PAM sequence: CTT
  source 1..20: mol_type = other DNA
cagcctcccaaagtgctggg

SEQ ID NO: 15154 - DNA, 20 bp, synthetic construct
  misc_feature 1..20: note = Description of Artificial Sequence: Synthetic oligonucleotide
  misc_feature 1..20: note = Target: ANGPTL4; (-) strand; PAM type: YTN; PAM sequence: CTC
  source 1..20: mol_type = other DNA
gcttcagcctcccaaagtgc

SEQ ID NO: 15155 - DNA, 20 bp, synthetic construct
  misc_feature 1..20: note = Description of Artificial Sequence: Synthetic oligonucleotide
  misc_feature 1..20: note = Target: ANGPTL4; (-) strand; PAM type: YTN; PAM sequence: CTC
  source 1..20: mol_type = other DNA
aagtgatccactcgcttcag

SEQ ID NO: 15156 - DNA, 20 bp, synthetic construct
  misc_feature 1..20: note = Description of Artificial Sequence: Synthetic oligonucleotide
  misc_feature 1..20: note = Target: ANGPTL4; (-) strand; PAM type: YTN; PAM sequence: CTG
  source 1..20: mol_type = other DNA
ggctcaagtgatccactcgc

SEQ ID NO: 15157 - DNA, 20 bp, synthetic construct
  misc_feature 1..20: note = Description of Artificial Sequence: Synthetic oligonucleotide
  misc_feature 1..20: note = Target: ANGPTL4; (-) strand; PAM type: YTN; PAM sequence: CTC
  source 1..20: mol_type = other DNA
ctgggctcaagtgatccact

SEQ ID NO: 15158 - DNA, 20 bp, synthetic construct
  misc_feature 1..20: note = Description of Artificial Sequence: Synthetic oligonucleotide
  misc_feature 1..20: note = Target: ANGPTL4; (-) strand; PAM type: YTN; PAM sequence: TTG
  source 1..20: mol_type = other DNA
gtctcctgggctcaagtgat

SEQ ID NO: 15159 - DNA, 20 bp, synthetic construct
  misc_feature 1..20: note = Description of Artificial Sequence: Synthetic oligonucleotide
  misc_feature 1..20: note = Target: ANGPTL4; (-) strand; PAM type: YTN; PAM sequence: CTC
  source 1..20: mol_type = other DNA
agattggtctcctgggctca

SEQ ID NO: 15160 - DNA, 20 bp, synthetic construct
  misc_feature 1..20: note = Description of Artificial Sequence: Synthetic oligonucleotide
  misc_feature 1..20: note = Target: ANGPTL4; (-) strand; PAM type: YTN; PAM sequence: TTG
  source 1..20: mol_type = other DNA
ctcagattggtctcctgggc

SEQ ID NO: 15161 - DNA, 20 bp, synthetic construct
  misc_feature 1..20: note = Description of Artificial Sequence: Synthetic oligonucleotide
  misc_feature 1..20: note = Target: ANGPTL4; (-) strand; PAM type: YTN; PAM sequence: CTG
  source 1..20: mol_type = other DNA
ttgctcagattggtctcctg

SEQ ID NO: 15162 - DNA, 20 bp, synthetic construct
  misc_feature 1..20: note = Description of Artificial Sequence: Synthetic oligonucleotide
  misc_feature 1..20: note = Target: ANGPTL4; (-) strand; PAM type: YTN; PAM sequence: TTC
  source 1..20: mol_type = other DNA
gccctgttgctcagattggt

SEQ ID NO: 15163 - DNA, 20 bp, synthetic construct
  misc_feature 1..20: note = Description of Artificial Sequence: Synthetic oligonucleotide
  misc_feature 1..20: note = Target: ANGPTL4; (-) strand; PAM type: YTN; PAM sequence: TTT
  source 1..20: mol_type = other DNA
cgccctgttgctcagattgg

SEQ ID NO: 15164 - DNA, 20 bp, synthetic construct
  misc_feature 1..20: note = Description of Artificial Sequence: Synthetic oligonucleotide
  misc_feature 1..20: note = Target: ANGPTL4; (-) strand; PAM type: YTN; PAM sequence: TTG
  source 1..20: mol_type = other DNA
agacaggatttcgccctgtt

SEQ ID NO: 15165 - DNA, 20 bp, synthetic construct
  misc_feature 1..20: note = Description of Artificial Sequence: Synthetic oligonucleotide
  misc_feature 1..20: note = Target: ANGPTL4; (-) strand; PAM type: YTN; PAM sequence: TTA
  source 1..20: mol_type = other DNA
attgagacaggatttcgccc

SEQ ID NO: 15166 - DNA, 20 bp, synthetic construct
  misc_feature 1..20: note = Description of Artificial Sequence: Synthetic oligonucleotide
  misc_feature 1..20: note = Target: ANGPTL4; (-) strand; PAM type: YTN; PAM sequence: TTT
  source 1..20: mol_type = other DNA
aattgagacaggatttcgcc

SEQ ID NO: 15167 - DNA, 20 bp, synthetic construct
  misc_feature 1..20: note = Description of Artificial Sequence: Synthetic oligonucleotide
  misc_feature 1..20: note = Target: ANGPTL4; (-) strand; PAM type: YTN; PAM sequence: TTT
  source 1..20: mol_type = other DNA
taattgagacaggatttcgc

SEQ ID NO: 15168 - DNA, 20 bp, synthetic construct
  misc_feature 1..20: note = Description of Artificial Sequence: Synthetic oligonucleotide
  misc_feature 1..20: note = Target: ANGPTL4; (-) strand; PAM type: YTN; PAM sequence: TTT
  source 1..20: mol_type = other DNA
ttaattgagacaggatttcg

SEQ ID NO: 15169 - DNA, 20 bp, synthetic construct
  misc_feature 1..20: note = Description of Artificial Sequence: Synthetic oligonucleotide
  misc_feature 1..20: note = Target: ANGPTL4; (-) strand; PAM type: YTN; PAM sequence: TTG
  source 1..20: mol_type = other DNA
tatttttaattgagacagga

SEQ ID NO: 15170 - DNA, 20 bp, synthetic construct
  misc_feature 1..20: note = Description of Artificial Sequence: Synthetic oligonucleotide
  misc_feature 1..20: note = Target: ANGPTL4; (-) strand; PAM type: YTN; PAM sequence: TTT
  source 1..20: mol_type = other DNA
gtatttttaattgagacagg

SEQ ID NO: 15171 - DNA, 20 bp, synthetic construct
  misc_feature 1..20: note = Description of Artificial Sequence: Synthetic oligonucleotide
  misc_feature 1..20: note = Target: ANGPTL4; (-) strand; PAM type: YTN; PAM sequence: TTT
  source 1..20: mol_type = other DNA
tgtatttttaattgagacag

SEQ ID NO: 15172 - DNA, 20 bp, synthetic construct
  misc_feature 1..20: note = Description of Artificial Sequence: Synthetic oligonucleotide
  misc_feature 1..20: note = Target: ANGPTL4; (-) strand; PAM type: YTN; PAM sequence: TTT
  source 1..20: mol_type = other DNA
ttgtatttttaattgagaca

SEQ ID NO: 15173 - DNA, 20 bp, synthetic construct
  misc_feature 1..20: note = Description of Artificial Sequence: Synthetic oligonucleotide
  misc_feature 1..20: note = Target: ANGPTL4; (-) strand; PAM type: YTN; PAM sequence: TTT
  source 1..20: mol_type = other DNA
tttgtatttttaattgagac

SEQ ID NO: 15174 - DNA, 20 bp, synthetic construct
  misc_feature 1..20: note = Description of Artificial Sequence: Synthetic oligonucleotide
  misc_feature 1..20: note = Target: ANGPTL4; (-) strand; PAM type: YTN; PAM sequence: CTA
  source 1..20: mol_type = other DNA
gttttttgtatttttaattg

SEQ ID NO: 15175 - DNA, 20 bp, synthetic construct
  misc_feature 1..20: note = Description of Artificial Sequence: Synthetic oligonucleotide
  misc_feature 1..20: note = Target: ANGPTL4; (-) strand; PAM type: YTN; PAM sequence: CTC
  source 1..20: mol_type = other DNA
ccaagtagatgggaacacag

SEQ ID NO: 15176 - DNA, 20 bp, synthetic construct
  misc_feature 1..20: note = Description of Artificial Sequence: Synthetic oligonucleotide
  misc_feature 1..20: note = Target: ANGPTL4; (-) strand; PAM type: YTN; PAM sequence: CTC
  source 1..20: mol_type = other DNA
agcctcccaagtagatggga

SEQ ID NO: 15177 - DNA, 20 bp, synthetic construct
  misc_feature 1..20: note = Description of Artificial Sequence: Synthetic oligonucleotide
  misc_feature 1..20: note = Target: ANGPTL4; (-) strand; PAM type: YTN; PAM sequence: CTC
  source 1..20: mol_type = other DNA
ccaactcagcctcccaagta

SEQ ID NO: 15178 - DNA, 20 bp, synthetic construct
  misc_feature 1..20: note = Description of Artificial Sequence: Synthetic oligonucleotide
  misc_feature 1..20: note = Target: ANGPTL4; (-) strand; PAM type: YTN; PAM sequence: CTC
  source 1..20: mol_type = other DNA
aagagatcctcccaactcag

SEQ ID NO: 15179 - DNA, 20 bp, synthetic construct
  misc_feature 1..20: note = Description of Artificial Sequence: Synthetic oligonucleotide
  misc_feature 1..20: note = Target: ANGPTL4; (-) strand; PAM type: YTN; PAM sequence: CTA
  source 1..20: mol_type = other DNA
ggctcaagagatcctcccaa

SEQ ID NO: 15180 - DNA, 20 bp, synthetic construct
  misc_feature 1..20: note = Description of Artificial Sequence: Synthetic oligonucleotide
  misc_feature 1..20: note = Target: ANGPTL4; (-) strand; PAM type: YTN; PAM sequence: CTC
  source 1..20: mol_type = other DNA
ctaggctcaagagatcctcc

SEQ ID NO: 15181 - DNA, 20 bp, synthetic construct
  misc_feature 1..20: note = Description of Artificial Sequence: Synthetic oligonucleotide
  misc_feature 1..20: note = Target: ANGPTL4; (-) strand; PAM type: YTN; PAM sequence: TTA
  source 1..20: mol_type = other DNA
tctcctaggctcaagagatc

SEQ ID NO: 15182 - DNA, 20 bp, synthetic construct
  misc_feature 1..20: note = Description of Artificial Sequence: Synthetic oligonucleotide
  misc_feature 1..20: note = Target: ANGPTL4; (-) strand; PAM type: YTN; PAM sequence: CTT
  source 1..20: mol_type = other DNA
atctcctaggctcaagagat

SEQ ID NO: 15183 - DNA, 20 bp, synthetic construct
  misc_feature 1..20: note = Description of Artificial Sequence: Synthetic oligonucleotide
  misc_feature 1..20: note = Target: ANGPTL4; (-) strand; PAM type: YTN; PAM sequence: CTG
  source 1..20: mol_type = other DNA
cagccttatctcctaggctc

SEQ ID NO: 15184 - DNA, 20 bp, synthetic construct
  misc_feature 1..20: note = Description of Artificial Sequence: Synthetic oligonucleotide
  misc_feature 1..20: note = Target: ANGPTL4; (-) strand; PAM type: YTN; PAM sequence: CTC
  source 1..20: mol_type = other DNA
actgcagccttatctcctag

SEQ ID NO: 15185 - DNA, 20 bp, synthetic construct
  misc_feature 1..20: note = Description of Artificial Sequence: Synthetic oligonucleotide
  misc_feature 1..20: note = Target: ANGPTL4; (-) strand; PAM type: YTN; PAM sequence: CTC
  source 1..20: mol_type = other DNA
agctcactgcagccttatct

SEQ ID NO: 15186 - DNA, 20 bp, synthetic construct
  misc_feature 1..20: note = Description of Artificial Sequence: Synthetic oligonucleotide
  misc_feature 1..20: note = Target: ANGPTL4; (-) strand; PAM type: YTN; PAM sequence: TTG
  source 1..20: mol_type = other DNA
agtgcagtggcgcagtctca

SEQ ID NO: 15187 - DNA, 20 bp, synthetic construct
  misc_feature 1..20: note = Description of Artificial Sequence: Synthetic oligonucleotide
  misc_feature 1..20: note = Target: ANGPTL4; (-) strand; PAM type: YTN; PAM sequence: CTT
  source 1..20: mol_type = other DNA
gagtgcagtggcgcagtctc

SEQ ID NO: 15188 - DNA, 20 bp, synthetic construct
  misc_feature 1..20: note = Description of Artificial Sequence: Synthetic oligonucleotide
  misc_feature 1..20: note = Target: ANGPTL4; (-) strand; PAM type: YTN; PAM sequence: CTG
  source 1..20: mol_type = other DNA
tcacccaggcttgagtgcag

SEQ ID NO: 15189 - DNA, 20 bp, synthetic construct
  misc_feature 1..20: note = Description of Artificial Sequence: Synthetic oligonucleotide
  misc_feature 1..20: note = Target: ANGPTL4; (-) strand; PAM type: YTN; PAM sequence: CTC
  source 1..20: mol_type = other DNA
tgtcacccaggcttgagtgc

SEQ ID NO: 15190 - DNA, 20 bp, synthetic construct
  misc_feature 1..20: note = Description of Artificial Sequence: Synthetic oligonucleotide
  misc_feature 1..20: note = Target: ANGPTL4; (-) strand; PAM type: YTN; PAM sequence: CTC
  source 1..20: mol_type = other DNA
actctgtcacccaggcttga

SEQ ID NO: 15191 - DNA, 20 bp, synthetic construct
  misc_feature 1..20: note = Description of Artificial Sequence: Synthetic oligonucleotide
  misc_feature 1..20: note = Target: ANGPTL4; (-) strand; PAM type: YTN; PAM sequence: TTG
  source 1..20: mol_type = other DNA
aggcaggggtctcactctgt

SEQ ID NO: 15192 - DNA, 20 bp, synthetic construct
  misc_feature 1..20: note = Description of Artificial Sequence: Synthetic oligonucleotide
  misc_feature 1..20: note = Target: ANGPTL4; (-) strand; PAM type: YTN; PAM sequence: TTT
  source 1..20: mol_type = other DNA
gaggcaggggtctcactctg

SEQ ID NO: 15193 - DNA, 20 bp, synthetic construct
  misc_feature 1..20: note = Description of Artificial Sequence: Synthetic oligonucleotide
  misc_feature 1..20: note = Target: ANGPTL4; (-) strand; PAM type: YTN; PAM sequence: TTT
  source 1..20: mol_type = other DNA
tgaggcaggggtctcactct

SEQ ID NO: 15194 - DNA, 20 bp, synthetic construct
  misc_feature 1..20: note = Description of Artificial Sequence: Synthetic oligonucleotide
  misc_feature 1..20: note = Target: ANGPTL4; (-) strand; PAM type: YTN; PAM sequence: CTT
  source 1..20: mol_type = other DNA
ttgaggcaggggtctcactc

SEQ ID NO: 15195 - DNA, 20 bp, synthetic construct
  misc_feature 1..20: note = Description of Artificial Sequence: Synthetic oligonucleotide
  misc_feature 1..20: note = Target: ANGPTL4; (-) strand; PAM type: YTN; PAM sequence: TTC
  source 1..20: mol_type = other DNA
ttttgaggcaggggtctcac

SEQ ID NO: 15196 - DNA, 20 bp, synthetic construct
  misc_feature 1..20: note = Description of Artificial Sequence: Synthetic oligonucleotide
  misc_feature 1..20: note = Target: ANGPTL4; (-) strand; PAM type: YTN; PAM sequence: TTT
  source 1..20: mol_type = other DNA
cttttgaggcaggggtctca

SEQ ID NO: 15197 - DNA, 20 bp, synthetic construct
  misc_feature 1..20: note = Description of Artificial Sequence: Synthetic oligonucleotide
  misc_feature 1..20: note = Target: ANGPTL4; (-) strand; PAM type: YTN; PAM sequence: TTT
  source 1..20: mol_type = other DNA
tcttttgaggcaggggtctc

SEQ ID NO: 15198 - DNA, 20 bp, synthetic construct
  misc_feature 1..20: note = Description of Artificial Sequence: Synthetic oligonucleotide
  misc_feature 1..20: note = Target: ANGPTL4; (-) strand; PAM type: YTN; PAM sequence: TTT
  source 1..20: mol_type = other DNA
ttcttttgaggcaggggtct

SEQ ID NO: 15199 - DNA, 20 bp, synthetic construct
  misc_feature 1..20: note = Description of Artificial Sequence: Synthetic oligonucleotide
  misc_feature 1..20: note = Target: ANGPTL4; (-) strand; PAM type: YTN; PAM sequence: CTT
  source 1..20: mol_type = other DNA
tttcttttgaggcaggggtc

SEQ ID NO: 15200 - DNA, 20 bp, synthetic construct
  misc_feature 1..20: note = Description of Artificial Sequence: Synthetic oligonucleotide
  misc_feature 1..20: note = Target: ANGPTL4; (-) strand; PAM type: YTN; PAM sequence: TTC
  source 1..20: mol_type = other DNA
tttttcttttgaggcagggg

SEQ ID NO: 15201 - DNA, 20 bp, synthetic construct
  misc_feature 1..20: note = Description of Artificial Sequence: Synthetic oligonucleotide
  misc_feature 1..20: note = Target: ANGPTL4; (-) strand; PAM type: YTN; PAM sequence: TTT
  source 1..20: mol_type = other DNA
ctttttcttttgaggcaggg

SEQ ID NO: 15202 - DNA, 20 bp, synthetic construct
  misc_feature 1..20: note = Description of Artificial Sequence: Synthetic oligonucleotide
  misc_feature 1..20: note = Target: ANGPTL4; (-) strand; PAM type: YTN; PAM sequence: TTT
  source 1..20: mol_type = other DNA
tctttttcttttgaggcagg

SEQ ID NO: 15203 - DNA, 20 bp, synthetic construct
  misc_feature 1..20: note = Description of Artificial Sequence: Synthetic oligonucleotide
  misc_feature 1..20: note = Target: ANGPTL4; (-) strand; PAM type: YTN; PAM sequence: TTT
  source 1..20: mol_type = other DNA
ttctttttcttttgaggcag

SEQ ID NO: 15204 - DNA, 20 bp, synthetic construct
  misc_feature 1..20: note = Description of Artificial Sequence: Synthetic oligonucleotide
  misc_feature 1..20: note = Target: ANGPTL4; (-) strand; PAM type: YTN; PAM sequence: TTT
  source 1..20: mol_type = other DNA
tttctttttcttttgaggca

SEQ ID NO: 15205 - DNA, 20 bp, synthetic construct
  misc_feature 1..20: note = Description of Artificial Sequence: Synthetic oligonucleotide
  misc_feature 1..20: note = Target: ANGPTL4; (-) strand; PAM type: YTN; PAM sequence: CTG
  source 1..20: mol_type = other DNA
cattttttctttttcttttg

SEQ ID NO: 15206 - DNA, 20 bp, synthetic construct
  misc_feature 1..20: note = Description of Artificial Sequence: Synthetic oligonucleotide
  misc_feature 1..20: note = Target: ANGPTL4; (-) strand; PAM type: YTN; PAM sequence: CTG
  source 1..20: mol_type = other DNA
ggaccacaggtgtgagccac

SEQ ID NO: 15207 - DNA, 20 bp, synthetic construct
  misc_feature 1..20: note = Description of Artificial Sequence: Synthetic oligonucleotide
  misc_feature 1..20: note = Target: ANGPTL4; (-) strand; PAM type: YTN; PAM sequence: CTC
  source 1..20: mol_type = other DNA
ccaagtagctgggaccacag

SEQ ID NO: 15208 - DNA, 20 bp, synthetic construct
  misc_feature 1..20: note = Description of Artificial Sequence: Synthetic oligonucleotide
  misc_feature 1..20: note = Target: ANGPTL4; (-) strand; PAM type: YTN; PAM sequence: CTG
  source 1..20: mol_type = other DNA
ggcctcccaagtagctggga

SEQ ID NO: 15209 - DNA, 20 bp, synthetic construct
  misc_feature 1..20: note = Description of Artificial Sequence: Synthetic oligonucleotide
  misc_feature 1..20: note = Target: ANGPTL4; (-) strand; PAM type: YTN; PAM sequence: TTG
  source 1..20: mol_type = other DNA
tacctgggcctcccaagtag

SEQ ID NO: 15210 - DNA, 20 bp, synthetic construct
  misc_feature 1..20: note = Description of Artificial Sequence: Synthetic oligonucleotide
  misc_feature 1..20: note = Target: ANGPTL4; (-) strand; PAM type: YTN; PAM sequence: CTT
  source 1..20: mol_type = other DNA
gtacctgggcctcccaagta

SEQ ID NO: 15211 - DNA, 20 bp, synthetic construct
  misc_feature 1..20: note = Description of Artificial Sequence: Synthetic oligonucleotide
  misc_feature 1..20: note = Target: ANGPTL4; (-) strand; PAM type: YTN; PAM sequence: TTC
  source 1..20: mol_type = other DNA
ttgtacctgggcctcccaag

SEQ ID NO: 15212 - DNA, 20 bp, synthetic construct
  misc_feature 1..20: note = Description of Artificial Sequence: Synthetic oligonucleotide
  misc_feature 1..20: note = Target: ANGPTL4; (-) strand; PAM type: YTN; PAM sequence: CTC
  source 1..20: mol_type = other DNA
aagtgattcttgtacctggg

SEQ ID NO: 15213 - DNA, 20 bp, synthetic construct
  misc_feature 1..20: note = Description of Artificial Sequence: Synthetic oligonucleotide
  misc_feature 1..20: note = Target: ANGPTL4; (-) strand; PAM type: YTN; PAM sequence: TTA
  source 1..20: mol_type = other DNA
cgggctcaagtgattcttgt

SEQ ID NO: 15214 - DNA, 20 bp, synthetic construct
  misc_feature 1..20: note = Description of Artificial Sequence: Synthetic oligonucleotide
  misc_feature 1..20: note = Target: ANGPTL4; (-) strand; PAM type: YTN; PAM sequence: CTT
  source 1..20: mol_type = other DNA
acgggctcaagtgattcttg

SEQ ID NO: 15215 - DNA, 20 bp, synthetic construct
  misc_feature 1..20: note = Description of Artificial Sequence: Synthetic oligonucleotide
  misc_feature 1..20: note = Target: ANGPTL4; (-) strand; PAM type: YTN; PAM sequence: CTC
  source 1..20: mol_type = other DNA
aatgcagcgtcaaccttacg

SEQ ID NO: 15216 - DNA, 20 bp, synthetic construct
  misc_feature 1..20: note = Description of Artificial Sequence: Synthetic oligonucleotide
  misc_feature 1..20: note = Target: ANGPTL4; (-) strand; PAM type: YTN; PAM sequence: CTG
  source 1..20: mol_type = other DNA
gagtgcagtggtgtggtgat

SEQ ID NO: 15217 - DNA, 20 bp, synthetic construct
  misc_feature 1..20: note = Description of Artificial Sequence: Synthetic oligonucleotide
  misc_feature 1..20: note = Target: ANGPTL4; (-) strand; PAM type: YTN; PAM sequence: TTG
  source 1..20: mol_type = other DNA
cccaggctggagtgcagtgg

SEQ ID NO: 15218 - DNA, 20 bp, synthetic construct
  misc_feature 1..20: note = Description of Artificial Sequence: Synthetic oligonucleotide
  misc_feature 1..20: note = Target: ANGPTL4; (-) strand; PAM type: YTN; PAM sequence: CTC
  source 1..20: mol_type = other DNA
cattgcccaggctggagtgc

SEQ ID NO: 15219 - DNA, 20 bp, synthetic construct
  misc_feature 1..20: note = Description of Artificial Sequence: Synthetic oligonucleotide
  misc_feature 1..20: note = Target: ANGPTL4; (-) strand; PAM type: YTN; PAM sequence: CTG
  source 1..20: mol_type = other DNA
gctccattgcccaggctgga

SEQ ID NO: 15220 - DNA, 20 bp, synthetic construct
  misc_feature 1..20: note = Description of Artificial Sequence: Synthetic oligonucleotide
  misc_feature 1..20: note = Target: ANGPTL4; (-) strand; PAM type: YTN; PAM sequence: TTG
  source 1..20: mol_type = other DNA
agacagggcctggctccatt

SEQ ID NO: 15221 - DNA, 20 bp, synthetic construct
  misc_feature 1..20: note = Description of Artificial Sequence: Synthetic oligonucleotide
  misc_feature 1..20: note = Target: ANGPTL4; (-) strand; PAM type: YTN; PAM sequence: TTT
  source 1..20: mol_type = other DNA
gagacagggcctggctccat

SEQ ID NO: 15222 - DNA, 20 bp, synthetic construct
  misc_feature 1..20: note = Description of Artificial Sequence: Synthetic oligonucleotide
  misc_feature 1..20: note = Target: ANGPTL4; (-) strand; PAM type: YTN; PAM sequence: TTT
  source 1..20: mol_type = other DNA
tgagacagggcctggctcca

SEQ ID NO: 15223 - DNA, 20 bp, synthetic construct
  misc_feature 1..20: note = Description of Artificial Sequence: Synthetic oligonucleotide
  misc_feature 1..20: note = Target: ANGPTL4; (-) strand; PAM type: YTN; PAM sequence: TTT
  source 1..20: mol_type = other DNA
ttgagacagggcctggctcc

SEQ ID NO: 15224 - DNA, 20 bp, synthetic construct
  misc_feature 1..20: note = Description of Artificial Sequence: Synthetic oligonucleotide
  misc_feature 1..20: note = Target: ANGPTL4; (-) strand; PAM type: YTN; PAM sequence: TTT
  source 1..20: mol_type = other DNA
tttgagacagggcctggctc

SEQ ID NO: 15225 - DNA, 20 bp, synthetic construct
  misc_feature 1..20: note = Description of Artificial Sequence: Synthetic oligonucleotide
  misc_feature 1..20: note = Target: ANGPTL4; (-) strand; PAM type: YTN; PAM sequence: TTT
  source 1..20: mol_type = other DNA
ttttgagacagggcctggct

SEQ ID NO: 15226 - DNA, 20 bp, synthetic construct
  misc_feature 1..20: note = Description of Artificial Sequence: Synthetic oligonucleotide
  misc_feature 1..20: note = Target: ANGPTL4; (-) strand; PAM type: YTN; PAM sequence: TTT
  source 1..20: mol_type = other DNA
tttttgagacagggcctggc

SEQ ID NO: 15227 - DNA, 20 bp, synthetic construct
  misc_feature 1..20: note = Description of Artificial Sequence: Synthetic oligonucleotide
  misc_feature 1..20: note = Target: ANGPTL4; (-) strand; PAM type: YTN; PAM sequence: TTA
  source 1..20: mol_type = other DNA
aaaacaattttttttgagac

SEQ ID NO: 15228 - DNA, 20 bp, synthetic construct
  misc_feature 1..20: note = Description of Artificial Sequence: Synthetic oligonucleotide
  misc_feature 1..20: note = Target: ANGPTL4; (-) strand; PAM type: YTN; PAM sequence: TTT
  source 1..20: mol_type = other DNA
aaaaacaattttttttgaga

SEQ ID NO: 15229 - DNA, 20 bp, synthetic construct
  misc_feature 1..20: note = Description of Artificial Sequence: Synthetic oligonucleotide
  misc_feature 1..20: note = Target: ANGPTL4; (-) strand; PAM type: YTN; PAM sequence: TTA
  source 1..20: mol_type = other DNA
agtttaaaaacaattttttt

SEQ ID NO: 15230 - DNA, 20 bp, synthetic construct
  misc_feature 1..20: note = Description of Artificial Sequence: Synthetic oligonucleotide
  misc_feature 1..20: note = Target: ANGPTL4; (-) strand; PAM type: YTN; PAM sequence: TTT
  source 1..20: mol_type = other DNA
aagtttaaaaacaatttttt

SEQ ID NO: 15231 - DNA, 20 bp, synthetic construct
  misc_feature 1..20: note = Description of Artificial Sequence: Synthetic oligonucleotide
  misc_feature 1..20: note = Target: ANGPTL4; (-) strand; PAM type: YTN; PAM sequence: TTT
  source 1..20: mol_type = other DNA
taagtttaaaaacaattttt

SEQ ID NO: 15232 - DNA, 20 bp, synthetic construct
  misc_feature 1..20: note = Description of Artificial Sequence: Synthetic oligonucleotide
  misc_feature 1..20: note = Target: ANGPTL4; (-) strand; PAM type: YTN; PAM sequence: TTT
  source 1..20: mol_type = other DNA
ttaagtttaaaaacaatttt

SEQ ID NO: 15233 - DNA, 20 bp, synthetic construct
  misc_feature 1..20: note = Description of Artificial Sequence: Synthetic oligonucleotide
  misc_feature 1..20: note = Target: ANGPTL4; (-) strand; PAM type: YTN; PAM sequence: TTA
  source 1..20: mol_type = other DNA
tttttaagtttaaaaacaat

SEQ ID NO: 15234 - DNA, 20 bp, synthetic construct
  misc_feature 1..20: note = Description of Artificial Sequence: Synthetic oligonucleotide
  misc_feature 1..20: note = Target: ANGPTL4; (-) strand; PAM type: YTN; PAM sequence: CTT
  source 1..20: mol_type = other DNA
atttttaagtttaaaaacaa

SEQ ID NO: 15235 - DNA, 20 bp, synthetic construct
  misc_feature 1..20: note = Description of Artificial Sequence: Synthetic oligonucleotide
  misc_feature 1..20: note = Target: ANGPTL4; (-) strand; PAM type: YTN; PAM sequence: TTA
  source 1..20: mol_type = other DNA
caggtgtgagcccccacacc

SEQ ID NO: 15236 - DNA, 20 bp, synthetic construct
  misc_feature 1..20: note = Description of Artificial Sequence: Synthetic oligonucleotide
  misc_feature 1..20: note = Target: ANGPTL4; (-) strand; PAM type: YTN; PAM sequence: CTG
  source 1..20: mol_type = other DNA
ggattacaggtgtgagcccc

SEQ ID NO: 15237 - DNA, 20 bp, synthetic construct
  misc_feature 1..20: note = Description of Artificial Sequence: Synthetic oligonucleotide
  misc_feature 1..20: note = Target: ANGPTL4; (-) strand; PAM type: YTN; PAM sequence: CTC
  source 1..20: mol_type = other DNA
ccaaagtgctgggattacag

SEQ ID NO: 15238 - DNA, 20 bp, synthetic construct
  misc_feature 1..20: note = Description of Artificial Sequence: Synthetic oligonucleotide
  misc_feature 1..20: note = Target: ANGPTL4; (-) strand; PAM type: YTN; PAM sequence: CTC
  source 1..20: mol_type = other DNA
ggcctcccaaagtgctggga

SEQ ID NO: 15239 - DNA, 20 bp, synthetic construct
  misc_feature 1..20: note = Description of Artificial Sequence: Synthetic oligonucleotide
  misc_feature 1..20: note = Target: ANGPTL4; (-) strand; PAM type: YTN; PAM sequence: CTC
  source 1..20: mol_type = other DNA
aggtgatccacccacctcgg

SEQ ID NO: 15240 - DNA, 20 bp, synthetic construct
  misc_feature 1..20: note = Description of Artificial Sequence: Synthetic oligonucleotide
  misc_feature 1..20: note = Target: ANGPTL4; (-) strand; PAM type: YTN; PAM sequence: CTG
  source 1..20: mol_type = other DNA
acctcaggtgatccacccac

SEQ ID NO: 15241 - DNA, 20 bp, synthetic construct
  misc_feature 1..20: note = Description of Artificial Sequence: Synthetic oligonucleotide
  misc_feature 1..20: note = Target: ANGPTL4; (-) strand; PAM type: YTN; PAM sequence: CTC
  source 1..20: mol_type = other DNA
ctgacctcaggtgatccacc

SEQ ID NO: 15242 - DNA, 20 bp, synthetic construct
  misc_feature 1..20: note = Description of Artificial Sequence: Synthetic oligonucleotide
  misc_feature 1..20: note = Target: ANGPTL4; (-) strand; PAM type: YTN; PAM sequence: TTG
  source 1..20: mol_type = other DNA
aactcctgacctcaggtgat

SEQ ID NO: 15243 - DNA, 20 bp, synthetic construct
  misc_feature 1..20: note = Description of Artificial Sequence: Synthetic oligonucleotide
  misc_feature 1..20: note = Target: ANGPTL4; (-) strand; PAM type: YTN; PAM sequence: TTT
  source 1..20: mol_type = other DNA
gaactcctgacctcaggtga

SEQ ID NO: 15244 - DNA, 20 bp, synthetic construct
  misc_feature 1..20: note = Description of Artificial Sequence: Synthetic oligonucleotide
  misc_feature 1..20: note = Target: ANGPTL4; (-) strand; PAM type: YTN; PAM sequence: TTT
  source 1..20: mol_type = other DNA
tgaactcctgacctcaggtg

SEQ ID NO: 15245 - DNA, 20 bp, synthetic construct
  misc_feature 1..20: note = Description of Artificial Sequence: Synthetic oligonucleotide
  misc_feature 1..20: note = Target: ANGPTL4; (-) strand; PAM type: YTN; PAM sequence: CTA
  source 1..20: mol_type = other DNA
gttttgaactcctgacctca

SEQ ID NO: 15246 - DNA, 20 bp, synthetic construct
  misc_feature 1..20: note = Description of Artificial Sequence: Synthetic oligonucleotide
  misc_feature 1..20: note = Target: ANGPTL4; (-) strand; PAM type: YTN; PAM sequence: TTG
  source 1..20: mol_type = other DNA
gccaggctagttttgaactc

SEQ ID NO: 15247 - DNA, 20 bp, synthetic construct
  misc_feature 1..20: note = Description of Artificial Sequence: Synthetic oligonucleotide
  misc_feature 1..20: note = Target: ANGPTL4; (-) strand; PAM type: YTN; PAM sequence: TTC
  source 1..20: mol_type = other DNA
accatgttggccaggctagt

SEQ ID NO: 15248 - DNA, 20 bp, synthetic construct
  misc_feature 1..20: note = Description of Artificial Sequence: Synthetic oligonucleotide
  misc_feature 1..20: note = Target: ANGPTL4; (-) strand; PAM type: YTN; PAM sequence: TTT
  source 1..20: mol_type = other DNA
caccatgttggccaggctag

SEQ ID NO: 15249 - DNA, 20 bp, synthetic construct
  misc_feature 1..20: note = Description of Artificial Sequence: Synthetic oligonucleotide
  misc_feature 1..20: note = Target: ANGPTL4; (-) strand; PAM type: YTN; PAM sequence: TTA
  source 1..20: mol_type = other DNA
gtagagacagggtttcacca

SEQ ID NO: 15250 - DNA, 20 bp, synthetic construct
  misc_feature 1..20: note = Description of Artificial Sequence: Synthetic oligonucleotide
  misc_feature 1..20: note = Target: ANGPTL4; (-) strand; PAM type: YTN; PAM sequence: TTT
  source 1..20: mol_type = other DNA
agtagagacagggtttcacc

SEQ ID NO: 15251 - DNA, 20 bp, synthetic construct
  misc_feature 1..20: note = Description of Artificial Sequence: Synthetic oligonucleotide
  misc_feature 1..20: note = Target: ANGPTL4; (-) strand; PAM type: YTN; PAM sequence: TTT
  source 1..20: mol_type = other DNA
tagtagagacagggtttcac

SEQ ID NO: 15252 - DNA, 20 bp, synthetic construct
  misc_feature 1..20: note = Description of Artificial Sequence: Synthetic oligonucleotide
  misc_feature 1..20: note = Target: ANGPTL4; (-) strand; PAM type: YTN; PAM sequence: TTT
  source 1..20: mol_type = other DNA
ttagtagagacagggtttca

SEQ ID NO: 15253 - DNA, 20 bp, synthetic construct
  misc_feature 1..20: note = Description of Artificial Sequence: Synthetic oligonucleotide
  misc_feature 1..20: note = Target: ANGPTL4; (-) strand; PAM type: YTN; PAM sequence: TTG
  source 1..20: mol_type = other DNA
tatttttagtagagacaggg

SEQ ID NO: 15254 - DNA, 20 bp, synthetic construct
  misc_feature 1..20: note = Description of Artificial Sequence: Synthetic oligonucleotide
  misc_feature 1..20: note = Target: ANGPTL4; (-) strand; PAM type: YTN; PAM sequence: TTT
  source 1..20: mol_type = other DNA
gtatttttagtagagacagg

SEQ ID NO: 15255 - DNA, 20 bp, synthetic construct
  misc_feature 1..20: note = Description of Artificial Sequence: Synthetic oligonucleotide
  misc_feature 1..20: note = Target: ANGPTL4; (-) strand; PAM type: YTN; PAM sequence: TTT
  source 1..20: mol_type = other DNA
tgtatttttagtagagacag

SEQ ID NO: 15256 - DNA, 20 bp, synthetic construct
  misc_feature 1..20: note = Description of Artificial Sequence: Synthetic oligonucleotide
  misc_feature 1..20: note = Target: ANGPTL4; (-) strand; PAM type: YTN; PAM sequence: TTT
  source 1..20: mol_type = other DNA
ttgtatttttagtagagaca

SEQ ID NO: 15257 - DNA, 20 bp, synthetic construct
  misc_feature 1..20: note = Description of Artificial Sequence: Synthetic oligonucleotide
  misc_feature 1..20: note = Target: ANGPTL4; (-) strand; PAM type: YTN; PAM sequence: CTA
  source 1..20: mol_type = other DNA
atttttgtatttttagtaga

SEQ ID NO: 15258 - DNA, 20 bp, synthetic construct
  misc_feature 1..20: note = Description of Artificial Sequence: Synthetic oligonucleotide
  misc_feature 1..20: note = Target: ANGPTL4; (-) strand; PAM type: YTN; PAM sequence: CTG
  source 1..20: mol_type = other DNA
gcctaatttttgtattttta

SEQ ID NO: 15259 - DNA, 20 bp, synthetic construct
  misc_feature 1..20: note = Description of Artificial Sequence: Synthetic oligonucleotide
  misc_feature 1..20: note = Target: ANGPTL4; (-) strand; PAM type: YTN; PAM sequence: CTG
  source 1..20: mol_type = other DNA
cgcctggcctaatttttgta

SEQ ID NO: 15260 - DNA, 20 bp, synthetic construct
  misc_feature 1..20: note = Description of Artificial Sequence: Synthetic oligonucleotide
  misc_feature 1..20: note = Target: ANGPTL4; (-) strand; PAM type: YTN; PAM sequence: TTA
  source 1..20: mol_type = other DNA
caggtatgacccactgcgcc

SEQ ID NO: 15261 - DNA, 20 bp, synthetic construct
  misc_feature 1..20: note = Description of Artificial Sequence: Synthetic oligonucleotide
  misc_feature 1..20: note = Target: ANGPTL4; (-) strand; PAM type: YTN; PAM sequence: CTG
  source 1..20: mol_type = other DNA
ggattacaggtatgacccac

SEQ ID NO: 15262 - DNA, 20 bp, synthetic construct
  misc_feature 1..20: note = Description of Artificial Sequence: Synthetic oligonucleotide
  misc_feature 1..20: note = Target: ANGPTL4; (-) strand; PAM type: YTN; PAM sequence: CTC
  source 1..20: mol_type = other DNA
ccaaagtgctgggattacag

SEQ ID NO: 15263 - DNA, 20 bp, synthetic construct
  misc_feature 1..20: note = Description of Artificial Sequence: Synthetic oligonucleotide
  misc_feature 1..20: note = Target: ANGPTL4; (-) strand; PAM type: YTN; PAM sequence: CTC
  source 1..20: mol_type = other DNA
agcctcccaaagtgctggga

SEQ ID NO: 15264 - DNA, 20 bp, synthetic construct
  misc_feature 1..20: note = Description of Artificial Sequence: Synthetic oligonucleotide
  misc_feature 1..20: note = Target: ANGPTL4; (-) strand; PAM type: YTN; PAM sequence: CTC
  source 1..20: mol_type = other DNA
ctcagcctcccaaagtgctg

SEQ ID NO: 15265 - DNA, 20 bp, synthetic construct
  misc_feature 1..20: note = Description of Artificial Sequence: Synthetic oligonucleotide
  misc_feature 1..20: note = Target: ANGPTL4; (-) strand; PAM type: YTN; PAM sequence: CTC
  source 1..20: mol_type = other DNA
atgtgatccaccctcctcag

SEQ ID NO: 15266 - DNA, 20 bp, synthetic construct
  misc_feature 1..20: note = Description of Artificial Sequence: Synthetic oligonucleotide
  misc_feature 1..20: note = Target: ANGPTL4; (-) strand; PAM type: YTN; PAM sequence: TTA
  source 1..20: mol_type = other DNA
cctcatgtgatccaccctcc

SEQ ID NO: 15267 - DNA, 20 bp, synthetic construct
  misc_feature 1..20: note = Description of Artificial Sequence: Synthetic oligonucleotide
  misc_feature 1..20: note = Target: ANGPTL4; (-) strand; PAM type: YTN; PAM sequence: CTT
  source 1..20: mol_type = other DNA
acctcatgtgatccaccctc

SEQ ID NO: 15268 - DNA, 20 bp, synthetic construct
  misc_feature 1..20: note = Description of Artificial Sequence: Synthetic oligonucleotide
  misc_feature 1..20: note = Target: ANGPTL4; (-) strand; PAM type: YTN; PAM sequence: CTC
  source 1..20: mol_type = other DNA
cttacctcatgtgatccacc

SEQ ID NO: 15269 - DNA, 20 bp, synthetic construct
  misc_feature 1..20: note = Description of Artificial Sequence: Synthetic oligonucleotide
  misc_feature 1..20: note = Target: ANGPTL4; (-) strand; PAM type: YTN; PAM sequence: CTC
  source 1..20: mol_type = other DNA
aaactccttacctcatgtga

SEQ ID NO: 15270 - DNA, 20 bp, synthetic construct
  misc_feature 1..20: note = Description of Artificial Sequence: Synthetic oligonucleotide
  misc_feature 1..20: note = Target: ANGPTL4; (-) strand; PAM type: YTN; PAM sequence: TTG
  source 1..20: mol_type = other DNA
gtctcaaactccttacctca

SEQ ID NO: 15271 - DNA, 20 bp, synthetic construct
  misc_feature 1..20: note = Description of Artificial Sequence: Synthetic oligonucleotide
  misc_feature 1..20: note = Target: ANGPTL4; (-) strand; PAM type: YTN; PAM sequence: TTG
  source 1..20: mol_type = other DNA
gccaggttggtctcaaactc

SEQ ID NO: 15272 - DNA, 20 bp, synthetic construct
  misc_feature 1..20: note = Description of Artificial Sequence: Synthetic oligonucleotide
  misc_feature 1..20: note = Target: ANGPTL4; (-) strand; PAM type: YTN; PAM sequence: TTC
  source 1..20: mol_type = other DNA
accatgttggccaggttggt

SEQ ID NO: 15273 - DNA, 20 bp, synthetic construct
  misc_feature 1..20: note = Description of Artificial Sequence: Synthetic oligonucleotide
  misc_feature 1..20: note = Target: ANGPTL4; (-) strand; PAM type: YTN; PAM sequence: TTT
  source 1..20: mol_type = other DNA
caccatgttggccaggttgg

SEQ ID NO: 15274 - DNA, 20 bp, synthetic construct
  misc_feature 1..20: note = Description of Artificial Sequence: Synthetic oligonucleotide
  misc_feature 1..20: note = Target: ANGPTL4; (-) strand; PAM type: YTN; PAM sequence: TTA
  source 1..20: mol_type = other DNA
gtagtgagggggtttcacca

SEQ ID NO: 15275 - DNA, 20 bp, synthetic construct
  misc_feature 1..20: note = Description of Artificial Sequence: Synthetic oligonucleotide
  misc_feature 1..20: note = Target: ANGPTL4; (-) strand; PAM type: YTN; PAM sequence: TTT
  source 1..20: mol_type = other DNA
agtagtgagggggtttcacc

SEQ ID NO: 15276 - DNA, 20 bp, synthetic construct
  misc_feature 1..20: note = Description of Artificial Sequence: Synthetic oligonucleotide
  misc_feature 1..20: note = Target: ANGPTL4; (-) strand; PAM type: YTN; PAM sequence: TTT
  source 1..20: mol_type = other DNA
tagtagtgagggggtttcac

SEQ ID NO: 15277 - DNA, 20 bp, synthetic construct
  misc_feature 1..20: note = Description of Artificial Sequence: Synthetic oligonucleotide
  misc_feature 1..20: note = Target: ANGPTL4; (-) strand; PAM type: YTN; PAM sequence: TTT
  source 1..20: mol_type = other DNA
ttagtagtgagggggtttca

SEQ ID NO: 15278 - DNA, 20 bp, synthetic construct
  misc_feature 1..20: note = Description of Artificial Sequence: Synthetic oligonucleotide
  misc_feature 1..20: note = Target: ANGPTL4; (-) strand; PAM type: YTN; PAM sequence: TTG
  source 1..20: mol_type = other DNA
tatttttagtagtgaggggg

SEQ ID NO: 15279 - DNA, 20 bp, synthetic construct
  misc_feature 1..20: note = Description of Artificial Sequence: Synthetic oligonucleotide
  misc_feature 1..20: note = Target: ANGPTL4; (-) strand; PAM type: YTN; PAM sequence: TTT
  source 1..20: mol_type = other DNA
gtatttttagtagtgagggg

SEQ ID NO: 15280 - DNA, 20 bp, synthetic construct
  misc_feature 1..20: note = Description of Artificial Sequence: Synthetic oligonucleotide
  misc_feature 1..20: note = Target: ANGPTL4; (-) strand; PAM type: YTN; PAM sequence: TTT
  source 1..20: mol_type = other DNA
tgtatttttagtagtgaggg

SEQ ID NO: 15281 - DNA, 20 bp, synthetic construct
  misc_feature 1..20: note = Description of Artificial Sequence: Synthetic oligonucleotide
  misc_feature 1..20: note = Target: ANGPTL4; (-) strand; PAM type: YTN; PAM sequence: TTT
  source 1..20: mol_type = other DNA
ttgtatttttagtagtgagg

SEQ ID NO: 15282 - DNA, 20 bp, synthetic construct
  misc_feature 1..20: note = Description of Artificial Sequence: Synthetic oligonucleotide
  misc_feature 1..20: note = Target: ANGPTL4; (-) strand; PAM type: YTN; PAM sequence: CTA
  source 1..20: mol_type = other DNA
gtttttgtatttttagtagt

SEQ ID NO: 15283 - DNA, 20 bp, synthetic construct
  misc_feature 1..20: note = Description of Artificial Sequence: Synthetic oligonucleotide
  misc_feature 1..20: note = Target: ANGPTL4; (-) strand; PAM type: YTN; PAM sequence: CTG
  source 1..20: mol_type = other DNA
gctagtttttgtatttttag

SEQ ID NO: 15284 - DNA, 20 bp, synthetic construct
  misc_feature 1..20: note = Description of Artificial Sequence: Synthetic oligonucleotide
  misc_feature 1..20: note = Target: ANGPTL4; (-) strand; PAM type: YTN; PAM sequence: TTA
  source 1..20: mol_type = other DNA
caggcacccgccaccacgcc

SEQ ID NO: 15285 - DNA, 20 bp, synthetic construct
  misc_feature 1..20: note = Description of Artificial Sequence: Synthetic oligonucleotide
  misc_feature 1..20: note = Target: ANGPTL4; (-) strand; PAM type: YTN; PAM sequence: CTG
  source 1..20: mol_type = other DNA
agtagccgggattacaggca

SEQ ID NO: 15286 - DNA, 20 bp, synthetic construct
  misc_feature 1..20: note = Description of Artificial Sequence: Synthetic oligonucleotide
  misc_feature 1..20: note = Target: ANGPTL4; (-) strand; PAM type: YTN; PAM sequence: CTC
  source 1..20: mol_type = other DNA
ctgagtagccgggattacag

SEQ ID NO: 15287 - DNA, 20 bp, synthetic construct
  misc_feature 1..20: note = Description of Artificial Sequence: Synthetic oligonucleotide
  misc_feature 1..20: note = Target: ANGPTL4; (-) strand; PAM type: YTN; PAM sequence: CTC
  source 1..20: mol_type = other DNA
agcctcctgagtagccggga

SEQ ID NO: 15288 - DNA, 20 bp, synthetic construct
  misc_feature 1..20: note = Description of Artificial Sequence: Synthetic oligonucleotide
  misc_feature 1..20: note = Target: ANGPTL4; (-) strand; PAM type: YTN; PAM sequence: CTC
  source 1..20: mol_type = other DNA
atgcctcagcctcctgagta

SEQ ID NO: 15289 - DNA, 20 bp, synthetic construct
  misc_feature 1..20: note = Description of Artificial Sequence: Synthetic oligonucleotide
  misc_feature 1..20: note = Target: ANGPTL4; (-) strand; PAM type: YTN; PAM sequence: TTC
  source 1..20: mol_type = other DNA
tcatgcctcagcctcctgag

SEQ ID NO: 15290 - DNA, 20 bp, synthetic construct
  misc_feature 1..20: note = Description of Artificial Sequence: Synthetic oligonucleotide
  misc_feature 1..20: note = Target: ANGPTL4; (-) strand; PAM type: YTN; PAM sequence: TTC
  source 1..20: mol_type = other DNA
aagggattctcatgcctcag

SEQ ID NO: 15291 - DNA, 20 bp, synthetic construct
  misc_feature 1..20: note = Description of Artificial Sequence: Synthetic oligonucleotide
  misc_feature 1..20: note = Target: ANGPTL4; (-) strand; PAM type: YTN; PAM sequence: CTC
  source 1..20: mol_type = other DNA
ccaggttcaagggattctca

SEQ ID NO: 15292 - DNA, 20 bp, synthetic construct
  misc_feature 1..20: note = Description of Artificial Sequence: Synthetic oligonucleotide
  misc_feature 1..20: note = Target: ANGPTL4; (-) strand; PAM type: YTN; PAM sequence: CTG
  source 1..20: mol_type = other DNA
cctcccaggttcaagggatt

SEQ ID NO: 15293 - DNA, 20 bp, synthetic construct
  misc_feature 1..20: note = Description of Artificial Sequence: Synthetic oligonucleotide
  misc_feature 1..20: note = Target: ANGPTL4; (-) strand; PAM type: YTN; PAM sequence: CTC
  source 1..20: mol_type = other DNA
tgcctcccaggttcaaggga

SEQ ID NO: 15294 - DNA, 20 bp, synthetic construct
  misc_feature 1..20: note = Description of Artificial Sequence: Synthetic oligonucleotide
  misc_feature 1..20: note = Target: ANGPTL4; (-) strand; PAM type: YTN; PAM sequence: CTG
  source 1..20: mol_type = other DNA
cacctctgcctcccaggttc

SEQ ID NO: 15295 - DNA, 20 bp, synthetic construct
  misc_feature 1..20: note = Description of Artificial Sequence: Synthetic oligonucleotide
  misc_feature 1..20: note = Target: ANGPTL4; (-) strand; PAM type: YTN; PAM sequence: CTC
  source 1..20: mol_type = other DNA
actgcacctctgcctcccag

SEQ ID NO: 15296 - DNA, 20 bp, synthetic construct
  misc_feature 1..20: note = Description of Artificial Sequence: Synthetic oligonucleotide
  misc_feature 1..20: note = Target: ANGPTL4; (-) strand; PAM type: YTN; PAM sequence: CTC
  source 1..20: mol_type = other DNA
ggctcactgcacctctgcct

SEQ ID NO: 15297 - DNA, 20 bp, synthetic construct
  misc_feature 1..20: note = Description of Artificial Sequence: Synthetic oligonucleotide
  misc_feature 1..20: note = Target: ANGPTL4; (-) strand; PAM type: YTN; PAM sequence: CTG
  source 1..20: mol_type = other DNA
gagtgcagtggcacaatctc

SEQ ID NO: 15298 - DNA, 20 bp, synthetic construct
  misc_feature 1..20: note = Description of Artificial Sequence: Synthetic oligonucleotide
  misc_feature 1..20: note = Target: ANGPTL4; (-) strand; PAM type: YTN; PAM sequence: CTC
  source 1..20: mol_type = other DNA
ccaggctggagtgcagtggc

SEQ ID NO: 15299 - DNA, 20 bp, synthetic construct
  misc_feature 1..20: note = Description of Artificial Sequence: Synthetic oligonucleotide
  misc_feature 1..20: note = Target: ANGPTL4; (-) strand; PAM type: YTN; PAM sequence: CTA
  source 1..20: mol_type = other DNA
tctcccaggctggagtgcag

SEQ ID NO: 15300 - DNA, 20 bp, synthetic construct
  misc_feature 1..20: note = Description of Artificial Sequence: Synthetic oligonucleotide
  misc_feature 1..20: note = Target: ANGPTL4; (-) strand; PAM type: YTN; PAM sequence: CTC
  source 1..20: mol_type = other DNA
tatctcccaggctggagtgc

SEQ ID NO: 15301 - DNA, 20 bp, synthetic construct
  misc_feature 1..20: note = Description of Artificial Sequence: Synthetic oligonucleotide
  misc_feature 1..20: note = Target: ANGPTL4; (-) strand; PAM type: YTN; PAM sequence: CTC
  source 1..20: mol_type = other DNA
actctatctcccaggctgga

SEQ ID NO: 15302 - DNA, 20 bp, synthetic construct
  misc_feature 1..20: note = Description of Artificial Sequence: Synthetic oligonucleotide
  misc_feature 1..20: note = Target: ANGPTL4; (-) strand; PAM type: YTN; PAM sequence: CTG
  source 1..20: mol_type = other DNA
agtctcactctatctcccag

SEQ ID NO: 15303 - DNA, 20 bp, synthetic construct
  misc_feature 1..20: note = Description of Artificial Sequence: Synthetic oligonucleotide
  misc_feature 1..20: note = Target: ANGPTL4; (-) strand; PAM type: YTN; PAM sequence: TTG
  source 1..20: mol_type = other DNA
agactgagtctcactctatc

SEQ ID NO: 15304 - DNA, 20 bp, synthetic construct
  misc_feature 1..20: note = Description of Artificial Sequence: Synthetic oligonucleotide
  misc_feature 1..20: note = Target: ANGPTL4; (-) strand; PAM type: YTN; PAM sequence: TTT
  source 1..20: mol_type = other DNA
gagactgagtctcactctat

SEQ ID NO: 15305 - DNA, 20 bp, synthetic construct
  misc_feature 1..20: note = Description of Artificial Sequence: Synthetic oligonucleotide
  misc_feature 1..20: note = Target: ANGPTL4; (-) strand; PAM type: YTN; PAM sequence: TTT
  source 1..20: mol_type = other DNA
tgagactgagtctcactcta

SEQ ID NO: 15306 - DNA, 20 bp, synthetic construct
  misc_feature 1..20: note = Description of Artificial Sequence: Synthetic oligonucleotide
  misc_feature 1..20: note = Target: ANGPTL4; (-) strand; PAM type: YTN; PAM sequence: TTT
  source 1..20: mol_type = other DNA
ttgagactgagtctcactct

SEQ ID NO: 15307 - DNA, 20 bp, synthetic construct
  misc_feature 1..20: note = Description of Artificial Sequence: Synthetic oligonucleotide
  misc_feature 1..20: note = Target: ANGPTL4; (-) strand; PAM type: YTN; PAM sequence: TTT
  source 1..20: mol_type = other DNA
tttgagactgagtctcactc

SEQ ID NO: 15308 - DNA, 20 bp, synthetic construct
  misc_feature 1..20: note = Description of Artificial Sequence: Synthetic oligonucleotide
  misc_feature 1..20: note = Target: ANGPTL4; (-) strand; PAM type: YTN; PAM sequence: TTT
  source 1..20: mol_type = other DNA
ttttgagactgagtctcact

SEQ ID NO: 15309 - DNA, 20 bp, synthetic construct
  misc_feature 1..20: note = Description of Artificial Sequence: Synthetic oligonucleotide
  misc_feature 1..20: note = Target: ANGPTL4; (-) strand; PAM type: YTN; PAM sequence: TTT
  source 1..20: mol_type = other DNA
tttttgagactgagtctcac

SEQ ID NO: 15310 - DNA, 20 bp, synthetic construct
  misc_feature 1..20: note = Description of Artificial Sequence: Synthetic oligonucleotide
  misc_feature 1..20: note = Target: ANGPTL4; (-) strand; PAM type: YTN; PAM sequence: TTT
  source 1..20: mol_type = other DNA
ttttttgagactgagtctca

SEQ ID NO: 15311 - DNA, 20 bp, synthetic construct
  misc_feature 1..20: note = Description of Artificial Sequence: Synthetic oligonucleotide
  misc_feature 1..20: note = Target: ANGPTL4; (-) strand; PAM type: YTN; PAM sequence: CTT
  source 1..20: mol_type = other DNA
tttttttgagactgagtctc

SEQ ID NO: 15312 - DNA, 20 bp, synthetic construct
  misc_feature 1..20: note = Description of Artificial Sequence: Synthetic oligonucleotide
  misc_feature 1..20: note = Target: ANGPTL4; (-) strand; PAM type: YTN; PAM sequence: TTG
  source 1..20: mol_type = other DNA
gtctttttttttgagactga

SEQ ID NO: 15313 - DNA, 20 bp, synthetic construct
  misc_feature 1..20: note = Description of Artificial Sequence: Synthetic oligonucleotide
  misc_feature 1..20: note = Target: ANGPTL4; (-) strand; PAM type: YTN; PAM sequence: TTT
  source 1..20: mol_type = other DNA
ggtctttttttttgagactg

SEQ ID NO: 15314 - DNA, 20 bp, synthetic construct
  misc_feature 1..20: note = Description of Artificial Sequence: Synthetic oligonucleotide
  misc_feature 1..20: note = Target: ANGPTL4; (-) strand; PAM type: YTN; PAM sequence: TTT
  source 1..20: mol_type = other DNA
tggtctttttttttgagact

SEQ ID NO: 15315 - DNA, 20 bp, synthetic construct
  misc_feature 1..20: note = Description of Artificial Sequence: Synthetic oligonucleotide
  misc_feature 1..20: note = Target: ANGPTL4; (-) strand; PAM type: YTN; PAM sequence: TTT
  source 1..20: mol_type = other DNA
ttggtctttttttttgagac

SEQ ID NO: 15316 - DNA, 20 bp, synthetic construct
  misc_feature 1..20: note = Description of Artificial Sequence: Synthetic oligonucleotide
  misc_feature 1..20: note = Target: ANGPTL4; (-) strand; PAM type: YTN; PAM sequence: CTA
  source 1..20: mol_type = other DNA
atttttggtctttttttttg

SEQ ID NO: 15317 - DNA, 20 bp, synthetic construct
  misc_feature 1..20: note = Description of Artificial Sequence: Synthetic oligonucleotide
  misc_feature 1..20: note = Target: ANGPTL4; (-) strand; PAM type: YTN; PAM sequence: CTG
  source 1..20: mol_type = other DNA
gctaatttttggtctttttt

SEQ ID NO: 15318 - DNA, 20 bp, synthetic construct
  misc_feature 1..20: note = Description of Artificial Sequence: Synthetic oligonucleotide
  misc_feature 1..20: note = Target: ANGPTL4; (-) strand; PAM type: YTN; PAM sequence: CTG
  source 1..20: mol_type = other DNA
ccaccacacctggctaattt

SEQ ID NO: 15319 - DNA, 20 bp, synthetic construct
  misc_feature 1..20: note = Description of Artificial Sequence: Synthetic oligonucleotide
  misc_feature 1..20: note = Target: ANGPTL4; (-) strand; PAM type: YTN; PAM sequence: TTA
  source 1..20: mol_type = other DNA
caggcgcctgccaccacacc

SEQ ID NO: 15320 - DNA, 20 bp, synthetic construct
  misc_feature 1..20: note = Description of Artificial Sequence: Synthetic oligonucleotide
  misc_feature 1..20: note = Target: ANGPTL4; (-) strand; PAM type: YTN; PAM sequence: CTG
  source 1..20: mol_type = other DNA
ggattacaggcgcctgccac

SEQ ID NO: 15321 - DNA, 20 bp, synthetic construct
  misc_feature 1..20: note = Description of Artificial Sequence: Synthetic oligonucleotide
  misc_feature 1..20: note = Target: ANGPTL4; (-) strand; PAM type: YTN; PAM sequence: CTC
  source 1..20: mol_type = other DNA
ccgagtagctgggattacag

SEQ ID NO: 15322 - DNA, 20 bp, synthetic construct
  misc_feature 1..20: note = Description of Artificial Sequence: Synthetic oligonucleotide
  misc_feature 1..20: note = Target: ANGPTL4; (-) strand; PAM type: YTN; PAM sequence: CTC
  source 1..20: mol_type = other DNA
agcctcccgagtagctggga

SEQ ID NO: 15323 - DNA, 20 bp, synthetic construct
  misc_feature 1..20: note = Description of Artificial Sequence: Synthetic oligonucleotide
  misc_feature 1..20: note = Target: ANGPTL4; (-) strand; PAM type: YTN; PAM sequence: CTC
  source 1..20: mol_type = other DNA
cctcagcctcccgagtagct

SEQ ID NO: 15324 - DNA, 20 bp, synthetic construct
  misc_feature 1..20: note = Description of Artificial Sequence: Synthetic oligonucleotide
  misc_feature 1..20: note = Target: ANGPTL4; (-) strand; PAM type: YTN; PAM sequence: CTC
  source 1..20: mol_type = other DNA
ctccctcagcctcccgagta

SEQ ID NO: 15325 - DNA, 20 bp, synthetic construct
  misc_feature 1..20: note = Description of Artificial Sequence: Synthetic oligonucleotide
  misc_feature 1..20: note = Target: ANGPTL4; (-) strand; PAM type: YTN; PAM sequence: TTC
  source 1..20: mol_type = other DNA
tcctccctcagcctcccgag

SEQ ID NO: 15326 - DNA, 20 bp, synthetic construct
  misc_feature 1..20: note = Description of Artificial Sequence: Synthetic oligonucleotide
  misc_feature 1..20: note = Target: ANGPTL4; (-) strand; PAM type: YTN; PAM sequence: TTA
  source 1..20: mol_type = other DNA
agtgattctcctccctcagc

SEQ ID NO: 15327 - DNA, 20 bp, synthetic construct
  misc_feature 1..20: note = Description of Artificial Sequence: Synthetic oligonucleotide
  misc_feature 1..20: note = Target: ANGPTL4; (-) strand; PAM type: YTN; PAM sequence: TTT
  source 1..20: mol_type = other DNA
aagtgattctcctccctcag

SEQ ID NO: 15328 - DNA, 20 bp, synthetic construct
  misc_feature 1..20: note = Description of Artificial Sequence: Synthetic oligonucleotide
  misc_feature 1..20: note = Target: ANGPTL4; (-) strand; PAM type: YTN; PAM sequence: CTC
  source 1..20: mol_type = other DNA
aggtttaagtgattctcctc

SEQ ID NO: 15329 - DNA, 20 bp, synthetic construct
  misc_feature 1..20: note = Description of Artificial Sequence: Synthetic oligonucleotide
  misc_feature 1..20: note = Target: ANGPTL4; (-) strand; PAM type: YTN; PAM sequence: CTC
  source 1..20: mol_type = other DNA
tcaggtttaagtgattctcc

SEQ ID NO: 15330 - DNA, 20 bp, synthetic construct
  misc_feature 1..20: note = Description of Artificial Sequence: Synthetic oligonucleotide
  misc_feature 1..20: note = Target: ANGPTL4; (-) strand; PAM type: YTN; PAM sequence: CTC
  source 1..20: mol_type = other DNA
cgtctctcaggtttaagtga

SEQ ID NO: 15331 - DNA, 20 bp, synthetic construct
  misc_feature 1..20: note = Description of Artificial Sequence: Synthetic oligonucleotide
  misc_feature 1..20: note = Target: ANGPTL4; (-) strand; PAM type: YTN; PAM sequence: CTG
  source 1..20: mol_type = other DNA
caacctccgtctctcaggtt

SEQ ID NO: 15332 - DNA, 20 bp, synthetic construct
  misc_feature 1..20: note = Description of Artificial Sequence: Synthetic oligonucleotide
  misc_feature 1..20: note = Target: ANGPTL4; (-) strand; PAM type: YTN; PAM sequence: CTC
  source 1..20: mol_type = other DNA
actgcaacctccgtctctca

SEQ ID NO: 15333 - DNA, 20 bp, synthetic construct
  misc_feature 1..20: note = Description of Artificial Sequence: Synthetic oligonucleotide
  misc_feature 1..20: note = Target: ANGPTL4; (-) strand; PAM type: YTN; PAM sequence: CTC
  source 1..20: mol_type = other DNA
agctcactgcaacctccgtc

SEQ ID NO: 15334 - DNA, 20 bp, synthetic construct
  misc_feature 1..20: note = Description of Artificial Sequence: Synthetic oligonucleotide
  misc_feature 1..20: note = Target: ANGPTL4; (-) strand; PAM type: YTN; PAM sequence: CTG
  source 1..20: mol_type = other DNA
gagtgcagtggtgcgatctc

SEQ ID NO: 15335 - DNA, 20 bp, synthetic construct
  misc_feature 1..20: note = Description of Artificial Sequence: Synthetic oligonucleotide
  misc_feature 1..20: note = Target: ANGPTL4; (-) strand; PAM type: YTN; PAM sequence: CTG
  source 1..20: mol_type = other DNA
tcacccaggctggagtgcag

SEQ ID NO: 15336 - DNA, 20 bp, synthetic construct
  misc_feature 1..20: note = Description of Artificial Sequence: Synthetic oligonucleotide
  misc_feature 1..20: note = Target: ANGPTL4; (-) strand; PAM type: YTN; PAM sequence: CTC
  source 1..20: mol_type = other DNA
tgtcacccaggctggagtgc

SEQ ID NO: 15337 - DNA, 20 bp, synthetic construct
  misc_feature 1..20: note = Description of Artificial Sequence: Synthetic oligonucleotide
  misc_feature 1..20: note = Target: ANGPTL4; (-) strand; PAM type: YTN; PAM sequence: TTA
  source 1..20: mol_type = other DNA
ctctgtcacccaggctggag

SEQ ID NO: 15338 - DNA, 20 bp, synthetic construct
  misc_feature 1..20: note = Description of Artificial Sequence: Synthetic oligonucleotide
  misc_feature 1..20: note = Target: ANGPTL4; (-) strand; PAM type: YTN; PAM sequence: CTT
  source 1..20: mol_type = other DNA
actctgtcacccaggctgga

SEQ ID NO: 15339 - DNA, 20 bp, synthetic construct
  misc_feature 1..20: note = Description of Artificial Sequence: Synthetic oligonucleotide
  misc_feature 1..20: note = Target: ANGPTL4; (-) strand; PAM type: YTN; PAM sequence: TTG
  source 1..20: mol_type = other DNA
agtcttactctgtcacccag

SEQ ID NO: 15340 - DNA, 20 bp, synthetic construct
  misc_feature 1..20: note = Description of Artificial Sequence: Synthetic oligonucleotide
  misc_feature 1..20: note = Target: ANGPTL4; (-) strand; PAM type: YTN; PAM sequence: TTG
  source 1..20: mol_type = other DNA
agattgagtcttactctgtc

SEQ ID NO: 15341 - DNA, 20 bp, synthetic construct
  misc_feature 1..20: note = Description of Artificial Sequence: Synthetic oligonucleotide
  misc_feature 1..20: note = Target: ANGPTL4; (-) strand; PAM type: YTN; PAM sequence: TTT
  source 1..20: mol_type = other DNA
gagattgagtcttactctgt

SEQ ID NO: 15342 - DNA, 20 bp, synthetic construct
  misc_feature 1..20: note = Description of Artificial Sequence: Synthetic oligonucleotide
  misc_feature 1..20: note = Target: ANGPTL4; (-) strand; PAM type: YTN; PAM sequence: TTT
  source 1..20: mol_type = other DNA
tgagattgagtcttactctg

SEQ ID NO: 15343 - DNA, 20 bp, synthetic construct
  misc_feature 1..20: note = Description of Artificial Sequence: Synthetic oligonucleotide
  misc_feature 1..20: note = Target: ANGPTL4; (-) strand; PAM type: YTN; PAM sequence: TTT
  source 1..20: mol_type = other DNA
ttgagattgagtcttactct

SEQ ID NO: 15344 - DNA, 20 bp, synthetic construct
  misc_feature 1..20: note = Description of Artificial Sequence: Synthetic oligonucleotide
  misc_feature 1..20: note = Target: ANGPTL4; (-) strand; PAM type: YTN; PAM sequence: TTT
  source 1..20: mol_type = other DNA
tttgagattgagtcttactc

SEQ ID NO: 15345 - DNA, 20 bp, synthetic construct
  misc_feature 1..20: note = Description of Artificial Sequence: Synthetic oligonucleotide
  misc_feature 1..20: note = Target: ANGPTL4; (-) strand; PAM type: YTN; PAM sequence: TTT
  source 1..20: mol_type = other DNA
ttttgagattgagtcttact

SEQ ID NO: 15346 - DNA, 20 bp, synthetic construct
  misc_feature 1..20: note = Description of Artificial Sequence: Synthetic oligonucleotide
  misc_feature 1..20: note = Target: ANGPTL4; (-) strand; PAM type: YTN; PAM sequence: TTT
  source 1..20: mol_type = other DNA
tttttgagattgagtcttac

SEQ ID NO: 15347 - DNA, 20 bp, synthetic construct
  misc_feature 1..20: note = Description of Artificial Sequence: Synthetic oligonucleotide
  misc_feature 1..20: note = Target: ANGPTL4; (-) strand; PAM type: YTN; PAM sequence: TTT
  source 1..20: mol_type = other DNA
ttttttgagattgagtctta

SEQ ID NO: 15348 - DNA, 20 bp, synthetic construct
  misc_feature 1..20: note = Description of Artificial Sequence: Synthetic oligonucleotide
  misc_feature 1..20: note = Target: ANGPTL4; (-) strand; PAM type: YTN; PAM sequence: TTT
  source 1..20: mol_type = other DNA
tttttttgagattgagtctt

SEQ ID NO: 15349 - DNA, 20 bp, synthetic construct
  misc_feature 1..20: note = Description of Artificial Sequence: Synthetic oligonucleotide
  misc_feature 1..20: note = Target: ANGPTL4; (-) strand; PAM type: YTN; PAM sequence: TTT
  source 1..20: mol_type = other DNA
ttttttttgagattgagtct

SEQ ID NO: 15350 - DNA, 20 bp, synthetic construct
  misc_feature 1..20: note = Description of Artificial Sequence: Synthetic oligonucleotide
  misc_feature 1..20: note = Target: ANGPTL4; (-) strand; PAM type: YTN; PAM sequence: TTT
  source 1..20: mol_type = other DNA
tttttttttgagattgagtc

SEQ ID NO: 15351 - DNA, 20 bp, synthetic construct
  misc_feature 1..20: note = Description of Artificial Sequence: Synthetic oligonucleotide
  misc_feature 1..20: note = Target: ANGPTL4; (-) strand; PAM type: YTN; PAM sequence: CTT
  source 1..20: mol_type = other DNA
ttttttttttgagattgagt

SEQ ID NO: 15352 - DNA, 20 bp, synthetic construct
  misc_feature 1..20: note = Description of Artificial Sequence: Synthetic oligonucleotide
  misc_feature 1..20: note = Target: ANGPTL4; (-) strand; PAM type: YTN; PAM sequence: TTG
  source 1..20: mol_type = other DNA
acttttttttttttgagatt

SEQ ID NO: 15353 - DNA, 20 bp, synthetic construct
  misc_feature 1..20: note = Description of Artificial Sequence: Synthetic oligonucleotide
  misc_feature 1..20: note = Target: ANGPTL4; (-) strand; PAM type: YTN; PAM sequence: CTT
  source 1..20: mol_type = other DNA
gacttttttttttttgagat

SEQ ID NO: 15354 - DNA, 20 bp, synthetic construct
  misc_feature 1..20: note = Description of Artificial Sequence: Synthetic oligonucleotide
  misc_feature 1..20: note = Target: ANGPTL4; (-) strand; PAM type: YTN; PAM sequence: TTG
  source 1..20: mol_type = other DNA
gacttgactttttttttttt

SEQ ID NO: 15355 - DNA, 20 bp, synthetic construct
  misc_feature 1..20: note = Description of Artificial Sequence: Synthetic oligonucleotide
  misc_feature 1..20: note = Target: ANGPTL4; (-) strand; PAM type: YTN; PAM sequence: TTT
  source 1..20: mol_type = other DNA
ggacttgacttttttttttt

SEQ ID NO: 15356 - DNA, 20 bp, synthetic construct
  misc_feature 1..20: note = Description of Artificial Sequence: Synthetic oligonucleotide
  misc_feature 1..20: note = Target: ANGPTL4; (-) strand; PAM type: YTN; PAM sequence: CTT
  source 1..20: mol_type = other DNA
tggacttgactttttttttt

SEQ ID NO: 15357 - DNA, 20 bp, synthetic construct
  misc_feature 1..20: note = Description of Artificial Sequence: Synthetic oligonucleotide
  misc_feature 1..20: note = Target: ANGPTL4; (-) strand; PAM type: YTN; PAM sequence: CTG
  source 1..20: mol_type = other DNA
ggctttggacttgacttttt

SEQ ID NO: 15358 - DNA, 20 bp, synthetic construct
  misc_feature 1..20: note = Description of Artificial Sequence: Synthetic oligonucleotide
  misc_feature 1..20: note = Target: ANGPTL4; (-) strand; PAM type: YTN; PAM sequence: TTG
  source 1..20: mol_type = other DNA
gggaccaggctgggctttgg

SEQ ID NO: 15359 - DNA, 20 bp, synthetic construct
  misc_feature 1..20: note = Description of Artificial Sequence: Synthetic oligonucleotide
  misc_feature 1..20: note = Target: ANGPTL4; (-) strand; PAM type: YTN; PAM sequence: TTG
  source 1..20: mol_type = other DNA
aggatgaggcaggttgggga

SEQ ID NO: 15360 - DNA, 20 bp, synthetic construct
  misc_feature 1..20: note = Description of Artificial Sequence: Synthetic oligonucleotide
  misc_feature 1..20: note = Target: ANGPTL4; (-) strand; PAM type: YTN; PAM sequence: CTG
  source 1..20: mol_type = other DNA
aaaggagatagggatagggt

SEQ ID NO: 15361 - DNA, 20 bp, synthetic construct
  misc_feature 1..20: note = Description of Artificial Sequence: Synthetic oligonucleotide
  misc_feature 1..20: note = Target: ANGPTL4; (-) strand; PAM type: YTN; PAM sequence: TTG
  source 1..20: mol_type = other DNA
agccaccgatggggctgaaa

SEQ ID NO: 15362 - DNA, 20 bp, synthetic construct
  misc_feature 1..20: note = Description of Artificial Sequence: Synthetic oligonucleotide
  misc_feature 1..20: note = Target: ANGPTL4; (-) strand; PAM type: YTN; PAM sequence: TTT
  source 1..20: mol_type = other DNA
gagccaccgatggggctgaa

SEQ ID NO: 15363 - DNA, 20 bp, synthetic construct
  misc_feature 1..20: note = Description of Artificial Sequence: Synthetic oligonucleotide
  misc_feature 1..20: note = Target: ANGPTL4; (-) strand; PAM type: YTN; PAM sequence: CTT
  source 1..20: mol_type = other DNA
tgagccaccgatggggctga

SEQ ID NO: 15364 - DNA, 20 bp, synthetic construct
  misc_feature 1..20: note = Description of Artificial Sequence: Synthetic oligonucleotide
  misc_feature 1..20: note = Target: ANGPTL4; (-) strand; PAM type: YTN; PAM sequence: CTG
  source 1..20: mol_type = other DNA
ccggggtcaggggagaggga

SEQ ID NO: 15365 - DNA, 20 bp, synthetic construct
  misc_feature 1..20: note = Description of Artificial Sequence: Synthetic oligonucleotide
  misc_feature 1..20: note = Target: ANGPTL4; (-) strand; PAM type: YTN; PAM sequence: CTC
  source 1..20: mol_type = other DNA
ctgccggggtcaggggagag

SEQ ID NO: 15366 - DNA, 20 bp, synthetic construct
  misc_feature 1..20: note = Description of Artificial Sequence: Synthetic oligonucleotide
  misc_feature 1..20: note = Target: ANGPTL4; (-) strand; PAM type: YTN; PAM sequence: CTG
  source 1..20: mol_type = other DNA
caggtgccaaaccaccagcc

SEQ ID NO: 15367 - DNA, 20 bp, synthetic construct
  misc_feature 1..20: note = Description of Artificial Sequence: Synthetic oligonucleotide
  misc_feature 1..20: note = Target: ANGPTL4; (-) strand; PAM type: YTN; PAM sequence: TTG
  source 1..20: mol_type = other DNA
gaatggctgcaggtgccaaa

SEQ ID NO: 15368 - DNA, 20 bp, synthetic construct
  misc_feature 1..20: note = Description of Artificial Sequence: Synthetic oligonucleotide
  misc_feature 1..20: note = Target: ANGPTL4; (-) strand; PAM type: YTN; PAM sequence: TTG
  source 1..20: mol_type = other DNA
aggttggaatggctgcaggt

SEQ ID NO: 15369 - DNA, 20 bp, synthetic construct
  misc_feature 1..20: note = Description of Artificial Sequence: Synthetic oligonucleotide
  misc_feature 1..20: note = Target: ANGPTL4; (-) strand; PAM type: YTN; PAM sequence: CTG
  source 1..20: mol_type = other DNA
gccgttgaggttggaatggc

SEQ ID NO: 15370 - DNA, 20 bp, synthetic construct
  misc_feature 1..20: note = Description of Artificial Sequence: Synthetic oligonucleotide
  misc_feature 1..20: note = Target: ANGPTL4; (-) strand; PAM type: YTN; PAM sequence: CTG
  source 1..20: mol_type = other DNA
tgggatggagcggaagtact

SEQ ID NO: 15371 - DNA, 20 bp, synthetic construct
  misc_feature 1..20: note = Description of Artificial Sequence: Synthetic oligonucleotide
  misc_feature 1..20: note = Target: ANGPTL4; (-) strand; PAM type: YTN; PAM sequence: CTG
  source 1..20: mol_type = other DNA
ctgtgggatggagcggaagt

SEQ ID NO: 15372 - DNA, 20 bp, synthetic construct
  misc_feature 1..20: note = Description of Artificial Sequence: Synthetic oligonucleotide
  misc_feature 1..20: note = Target: ANGPTL4; (-) strand; PAM type: YTN; PAM sequence: CTG
  source 1..20: mol_type = other DNA
ccgctgctgtgggatggagc

SEQ ID NO: 15373 - DNA, 20 bp, synthetic construct
  misc_feature 1..20: note = Description of Artificial Sequence: Synthetic oligonucleotide
  misc_feature 1..20: note = Target: ANGPTL4; (-) strand; PAM type: YTN; PAM sequence: TTC
  source 1..20: mol_type = other DNA
tgccgctgctgtgggatgga

SEQ ID NO: 15374 - DNA, 20 bp, synthetic construct
  misc_feature 1..20: note = Description of Artificial Sequence: Synthetic oligonucleotide
  misc_feature 1..20: note = Target: ANGPTL4; (-) strand; PAM type: YTN; PAM sequence: CTT
  source 1..20: mol_type = other DNA
ctgccgctgctgtgggatgg

SEQ ID NO: 15375 - DNA, 20 bp, synthetic construct
  misc_feature 1..20: note = Description of Artificial Sequence: Synthetic oligonucleotide
  misc_feature 1..20: note = Target: ANGPTL4; (-) strand; PAM type: YTN; PAM sequence: TTA
  source 1..20: mol_type = other DNA
agcttctgccgctgctgtgg

SEQ ID NO: 15376 - DNA, 20 bp, synthetic construct
  misc_feature 1..20: note = Description of Artificial Sequence: Synthetic oligonucleotide
  misc_feature 1..20: note = Target: ANGPTL4; (-) strand; PAM type: YTN; PAM sequence: CTT
  source 1..20: mol_type = other DNA
aagcttctgccgctgctgtg

SEQ ID NO: 15377 - DNA, 20 bp, synthetic construct
  misc_feature 1..20: note = Description of Artificial Sequence: Synthetic oligonucleotide
  misc_feature 1..20: note = Target: ANGPTL4; (-) strand; PAM type: YTN; PAM sequence: TTC
  source 1..20: mol_type = other DNA
ttaagcttctgccgctgctg

SEQ ID NO: 15378 - DNA, 20 bp, synthetic construct
  misc_feature 1..20: note = Description of Artificial Sequence: Synthetic oligonucleotide
  misc_feature 1..20: note = Target: ANGPTL4; (-) strand; PAM type: YTN; PAM sequence: CTT
  source 1..20: mol_type = other DNA
cttaagcttctgccgctgct

SEQ ID NO: 15379 - DNA, 20 bp, synthetic construct
  misc_feature 1..20: note = Description of Artificial Sequence: Synthetic oligonucleotide
  misc_feature 1..20: note = Target: ANGPTL4; (-) strand; PAM type: YTN; PAM sequence: TTC
  source 1..20: mol_type = other DNA
ccttcttaagcttctgccgc

SEQ ID NO: 15380 - DNA, 20 bp, synthetic construct
  misc_feature 1..20: note = Description of Artificial Sequence: Synthetic oligonucleotide
  misc_feature 1..20: note = Target: ANGPTL4; (-) strand; PAM type: YTN; PAM sequence: TTC
  source 1..20: mol_type = other DNA
cagaagattcccttcttaag

SEQ ID NO: 15381 - DNA, 20 bp, synthetic construct
  misc_feature 1..20: note = Description of Artificial Sequence: Synthetic oligonucleotide
  misc_feature 1..20: note = Target: ANGPTL4; (-) strand; PAM type: YTN; PAM sequence: CTT
  source 1..20: mol_type = other DNA
ccagaagattcccttcttaa

SEQ ID NO: 15382 - DNA, 20 bp, synthetic construct
  misc_feature 1..20: note = Description of Artificial Sequence: Synthetic oligonucleotide
  misc_feature 1..20: note = Target: ANGPTL4; (-) strand; PAM type: YTN; PAM sequence: CTG
  source 1..20: mol_type = other DNA
cagcgggtagtagcggcccc

SEQ ID NO: 15383 - DNA, 20 bp, synthetic construct
  misc_feature 1..20: note = Description of Artificial Sequence: Synthetic oligonucleotide
  misc_feature 1..20: note = Target: ANGPTL4; (-) strand; PAM type: YTN; PAM sequence: CTG
  source 1..20: mol_type = other DNA
gatcaacatggtggtggcct

SEQ ID NO: 15384 - DNA, 20 bp, synthetic construct
  misc_feature 1..20: note = Description of Artificial Sequence: Synthetic oligonucleotide
  misc_feature 1..20: note = Target: ANGPTL4; (-) strand; PAM type: YTN; PAM sequence: CTG
  source 1..20: mol_type = other DNA
ccatgggctggatcaacatg

SEQ ID NO: 15385 - DNA, 20 bp, synthetic construct
  misc_feature 1..20: note = Description of Artificial Sequence: Synthetic oligonucleotide
  misc_feature 1..20: note = Target: ANGPTL4; (-) strand; PAM type: YTN; PAM sequence: CTG
  source 1..20: mol_type = other DNA
ctgccatgggctggatcaac

SEQ ID NO: 15386 - DNA, 20 bp, synthetic construct
  misc_feature 1..20: note = Description of Artificial Sequence: Synthetic oligonucleotide
  misc_feature 1..20: note = Target: ANGPTL4; (-) strand; PAM type: YTN; PAM sequence: CTC
  source 1..20: mol_type = other DNA
tgctgccatgggctggatca

SEQ ID NO: 15387 - DNA, 20 bp, synthetic construct
  misc_feature 1..20: note = Description of Artificial Sequence: Synthetic oligonucleotide
  misc_feature 1..20: note = Target: ANGPTL4; (-) strand; PAM type: YTN; PAM sequence: CTG
  source 1..20: mol_type = other DNA
cctctgctgccatgggctgg

SEQ ID NO: 15388 - DNA, 20 bp, synthetic construct
  misc_feature 1..20: note = Description of Artificial Sequence: Synthetic oligonucleotide
  misc_feature 1..20: note = Target: ANGPTL4; (-) strand; PAM type: YTN; PAM sequence: CTA
  source 1..20: mol_type = other DNA
ggaggctgcctctgctgcca

SEQ ID NO: 15389 - DNA, 20 bp, synthetic construct
  misc_feature 1..20: note = Description of Artificial Sequence: Synthetic oligonucleotide
  misc_feature 1..20: note = Target: ANGPTL4; (-) strand; PAM type: YTN; PAM sequence: CTG
  source 1..20: mol_type = other DNA
ggaccaggcccagccaggac

SEQ ID NO: 15390 - DNA, 20 bp, synthetic construct
  misc_feature 1..20: note = Description of Artificial Sequence: Synthetic oligonucleotide
  misc_feature 1..20: note = Target: ANGPTL4; (-) strand; PAM type: YTN; PAM sequence: TTC
  source 1..20: mol_type = other DNA
gtgggcctgggaccaggccc

SEQ ID NO: 15391 - DNA, 20 bp, synthetic construct
  misc_feature 1..20: note = Description of Artificial Sequence: Synthetic oligonucleotide
  misc_feature 1..20: note = Target: ANGPTL4; (-) strand; PAM type: YTN; PAM sequence: TTT
  source 1..20: mol_type = other DNA
cgtgggcctgggaccaggcc

SEQ ID NO: 15392 - DNA, 20 bp, synthetic construct
  misc_feature 1..20: note = Description of Artificial Sequence: Synthetic oligonucleotide
  misc_feature 1..20: note = Target: ANGPTL4; (-) strand; PAM type: YTN; PAM sequence: CTT
  source 1..20: mol_type = other DNA
tcgtgggcctgggaccaggc

SEQ ID NO: 15393 - DNA, 20 bp, synthetic construct
  misc_feature 1..20: note = Description of Artificial Sequence: Synthetic oligonucleotide
  misc_feature 1..20: note = Target: ANGPTL4; (-) strand; PAM type: YTN; PAM sequence: CTC
  source 1..20: mol_type = other DNA
gggcagagccaagagtcacc

SEQ ID NO: 15394 - DNA, 20 bp, synthetic construct
  misc_feature 1..20: note = Description of Artificial Sequence: Synthetic oligonucleotide
  misc_feature 1..20: note = Target: ANGPTL4; (-) strand; PAM type: YTN; PAM sequence: CTG
  source 1..20: mol_type = other DNA
cccaggcagggaacggccac

SEQ ID NO: 15395 - DNA, 20 bp, synthetic construct
  misc_feature 1..20: note = Description of Artificial Sequence: Synthetic oligonucleotide
  misc_feature 1..20: note = Target: ANGPTL4; (-) strand; PAM type: YTN; PAM sequence: TTG
  source 1..20: mol_type = other DNA
gagcccctgcccaggcaggg

SEQ ID NO: 15396 - DNA, 20 bp, synthetic construct
  misc_feature 1..20: note = Description of Artificial Sequence: Synthetic oligonucleotide
  misc_feature 1..20: note = Target: ANGPTL4; (-) strand; PAM type: YTN; PAM sequence: CTT
  source 1..20: mol_type = other DNA
ggagcccctgcccaggcagg

SEQ ID NO: 15397 - DNA, 20 bp, synthetic construct
  misc_feature 1..20: note = Description of Artificial Sequence: Synthetic oligonucleotide
  misc_feature 1..20: note = Target: ANGPTL4; (-) strand; PAM type: YTN; PAM sequence: CTC
  source 1..20: mol_type = other DNA
cttggagcccctgcccaggc

SEQ ID NO: 15398 - DNA, 20 bp, synthetic construct
  misc_feature 1..20: note = Description of Artificial Sequence: Synthetic oligonucleotide
  misc_feature 1..20: note = Target: ANGPTL4; (-) strand; PAM type: YTN; PAM sequence: TTC
  source 1..20: mol_type = other DNA
cagatggcccctccttggag

SEQ ID NO: 15399 - DNA, 20 bp, synthetic construct
  misc_feature 1..20: note = Description of Artificial Sequence: Synthetic oligonucleotide
  misc_feature 1..20: note = Target: ANGPTL4; (-) strand; PAM type: YTN; PAM sequence: TTT
  source 1..20: mol_type = other DNA
ccagatggcccctccttgga

SEQ ID NO: 15400 - DNA, 20 bp, synthetic construct
  misc_feature 1..20: note = Description of Artificial Sequence: Synthetic oligonucleotide
  misc_feature 1..20: note = Target: ANGPTL4; (-) strand; PAM type: YTN; PAM sequence: CTG
  source 1..20: mol_type = other DNA
tccacaagtttccagatggc

SEQ ID NO: 15401 - DNA, 20 bp, synthetic construct
  misc_feature 1..20: note = Description of Artificial Sequence: Synthetic oligonucleotide
  misc_feature 1..20: note = Target: ANGPTL4; (-) strand; PAM type: YTN; PAM sequence: CTC
  source 1..20: mol_type = other DNA
tgtccacaagtttccagatg

SEQ ID NO: 15402 - DNA, 20 bp, synthetic construct
  misc_feature 1..20: note = Description of Artificial Sequence: Synthetic oligonucleotide
  misc_feature 1..20: note = Target: ANGPTL4; (-) strand; PAM type: YTN; PAM sequence: TTC
  source 1..20: mol_type = other DNA
tctgtccacaagtttccaga

SEQ ID NO: 15403 - DNA, 20 bp, synthetic construct
  misc_feature 1..20: note = Description of Artificial Sequence: Synthetic oligonucleotide
  misc_feature 1..20: note = Target: ANGPTL4; (-) strand; PAM type: YTN; PAM sequence: CTT
  source 1..20: mol_type = other DNA
ctctgtccacaagtttccag

SEQ ID NO: 15404 - DNA, 20 bp, synthetic construct
  misc_feature 1..20: note = Description of Artificial Sequence: Synthetic oligonucleotide
  misc_feature 1..20: note = Target: ANGPTL4; (-) strand; PAM type: YTN; PAM sequence: TTC
  source 1..20: mol_type = other DNA
ttctctgtccacaagtttcc

SEQ ID NO: 15405 - DNA, 20 bp, synthetic construct
  misc_feature 1..20: note = Description of Artificial Sequence: Synthetic oligonucleotide
  misc_feature 1..20: note = Target: ANGPTL4; (-) strand; PAM type: YTN; PAM sequence: CTT
  source 1..20: mol_type = other DNA
cttctctgtccacaagtttc

SEQ ID NO: 15406 - DNA, 20 bp, synthetic construct
  misc_feature 1..20: note = Description of Artificial Sequence: Synthetic oligonucleotide
  misc_feature 1..20: note = Target: ANGPTL4; (-) strand; PAM type: YTN; PAM sequence: CTC
  source 1..20: mol_type = other DNA
cagtcgtggtcttcttctct

SEQ ID NO: 15407 - DNA, 20 bp, synthetic construct
  misc_feature 1..20: note = Description of Artificial Sequence: Synthetic oligonucleotide
  misc_feature 1..20: note = Target: ANGPTL4; (-) strand; PAM type: YTN; PAM sequence: TTC
  source 1..20: mol_type = other DNA
tccagtcgtggtcttcttct

SEQ ID NO: 15408 - DNA, 20 bp, synthetic construct
  misc_feature 1..20: note = Description of Artificial Sequence: Synthetic oligonucleotide
  misc_feature 1..20: note = Target: ANGPTL4; (-) strand; PAM type: YTN; PAM sequence: CTT
  source 1..20: mol_type = other DNA
ctccagtcgtggtcttcttc

SEQ ID NO: 15409 - DNA, 20 bp, synthetic construct
  misc_feature 1..20: note = Description of Artificial Sequence: Synthetic oligonucleotide
  misc_feature 1..20: note = Target: ANGPTL4; (-) strand; PAM type: YTN; PAM sequence: CTC
  source 1..20: mol_type = other DNA
agaaagggggcttctccagt

SEQ ID NO: 15410 - DNA, 20 bp, synthetic construct
  misc_feature 1..20: note = Description of Artificial Sequence: Synthetic oligonucleotide
  misc_feature 1..20: note = Target: ANGPTL4; (-) strand; PAM type: YTN; PAM sequence: CTG
  source 1..20: mol_type = other DNA
cactcagaaagggggcttct

SEQ ID NO: 15411 - DNA, 20 bp, synthetic construct
  misc_feature 1..20: note = Description of Artificial Sequence: Synthetic oligonucleotide
  misc_feature 1..20: note = Target: ANGPTL4; (-) strand; PAM type: YTN; PAM sequence: CTC
  source 1..20: mol_type = other DNA
aggaggcaacgcatgcagcc

SEQ ID NO: 15412 - DNA, 20 bp, synthetic construct
  misc_feature 1..20: note = Description of Artificial Sequence: Synthetic oligonucleotide
  misc_feature 1..20: note = Target: ANGPTL4; (-) strand; PAM type: YTN; PAM sequence: CTC
  source 1..20: mol_type = other DNA
gatctcaggaggcaacgcat

SEQ ID NO: 15413 - DNA, 20 bp, synthetic construct
  misc_feature 1..20: note = Description of Artificial Sequence: Synthetic oligonucleotide
  misc_feature 1..20: note = Target: ANGPTL4; (-) strand; PAM type: YTN; PAM sequence: CTG
  source 1..20: mol_type = other DNA
cagcctcgatctcaggaggc

SEQ ID NO: 15414 - DNA, 20 bp, synthetic construct
  misc_feature 1..20: note = Description of Artificial Sequence: Synthetic oligonucleotide
  misc_feature 1..20: note = Target: ANGPTL4; (-) strand; PAM type: YTN; PAM sequence: CTG
  source 1..20: mol_type = other DNA
agcatatcctgcagcctcga

SEQ ID NO: 15415 - DNA, 20 bp, synthetic construct
  misc_feature 1..20: note = Description of Artificial Sequence: Synthetic oligonucleotide
  misc_feature 1..20: note = Target: ANGPTL4; (-) strand; PAM type: YTN; PAM sequence: CTA
  source 1..20: mol_type = other DNA
gagtctgagcatatcctgca

SEQ ID NO: 15416 - DNA, 20 bp, synthetic construct
  misc_feature 1..20: note = Description of Artificial Sequence: Synthetic oligonucleotide
  misc_feature 1..20: note = Target: ANGPTL4; (-) strand; PAM type: YTN; PAM sequence: CTC
  source 1..20: mol_type = other DNA
tagagtctgagcatatcctg

SEQ ID NO: 15417 - DNA, 20 bp, synthetic construct
  misc_feature 1..20: note = Description of Artificial Sequence: Synthetic oligonucleotide
  misc_feature 1..20: note = Target: ANGPTL4; (-) strand; PAM type: YTN; PAM sequence: TTG
  source 1..20: mol_type = other DNA
gtccacgcctctagagtctg

SEQ ID NO: 15418 - DNA, 20 bp, synthetic construct
  misc_feature 1..20: note = Description of Artificial Sequence: Synthetic oligonucleotide
  misc_feature 1..20: note = Target: ANGPTL4; (-) strand; PAM type: YTN; PAM sequence: CTT
  source 1..20: mol_type = other DNA
ggtccacgcctctagagtct

SEQ ID NO: 15419 - DNA, 20 bp, synthetic construct
  misc_feature 1..20: note = Description of Artificial Sequence: Synthetic oligonucleotide
  misc_feature 1..20: note = Target: ANGPTL4; (-) strand; PAM type: YTN; PAM sequence: CTC
  source 1..20: mol_type = other DNA
catgccccttggtccacgcc

SEQ ID NO: 15420 - DNA, 20 bp, synthetic construct
  misc_feature 1..20: note = Description of Artificial Sequence: Synthetic oligonucleotide
  misc_feature 1..20: note = Target: ANGPTL4; (-) strand; PAM type: YTN; PAM sequence: CTG
  source 1..20: mol_type = other DNA
gccagcaaggagtgaagctc

SEQ ID NO: 15421 - DNA, 20 bp, synthetic construct
  misc_feature 1..20: note = Description of Artificial Sequence: Synthetic oligonucleotide
  misc_feature 1..20: note = Target: ANGPTL4; (-) strand; PAM type: YTN; PAM sequence: CTC
  source 1..20: mol_type = other DNA
cctggccagcaaggagtgaa

SEQ ID NO: 15422 - DNA, 20 bp, synthetic construct
  misc_feature 1..20: note = Description of Artificial Sequence: Synthetic oligonucleotide
  misc_feature 1..20: note = Target: ANGPTL4; (-) strand; PAM type: YTN; PAM sequence: CTG
  source 1..20: mol_type = other DNA
agtccccaactccctggcca

SEQ ID NO: 15423 - DNA, 20 bp, synthetic construct
  misc_feature 1..20: note = Description of Artificial Sequence: Synthetic oligonucleotide
  misc_feature 1..20: note = Target: ANGPTL4; (-) strand; PAM type: YTN; PAM sequence: CTC
  source 1..20: mol_type = other DNA
tgagtccccaactccctggc

SEQ ID NO: 15424 - DNA, 20 bp, synthetic construct
  misc_feature 1..20: note = Description of Artificial Sequence: Synthetic oligonucleotide
  misc_feature 1..20: note = Target: ANGPTL4; (-) strand; PAM type: YTN; PAM sequence: CTG
  source 1..20: mol_type = other DNA
gccccaagtggtccctctga

SEQ ID NO: 15425 - DNA, 20 bp, synthetic construct
  misc_feature 1..20: note = Description of Artificial Sequence: Synthetic oligonucleotide
  misc_feature 1..20: note = Target: ANGPTL4; (-) strand; PAM type: YTN; PAM sequence: CTG
  source 1..20: mol_type = other DNA
gctggccccaagtggtccct

SEQ ID NO: 15426 - DNA, 20 bp, synthetic construct
  misc_feature 1..20: note = Description of Artificial Sequence: Synthetic oligonucleotide
  misc_feature 1..20: note = Target: ANGPTL4; (-) strand; PAM type: YTN; PAM sequence: TTG
  source 1..20: mol_type = other DNA
aggccagtctggctggcccc

SEQ ID NO: 15427 - DNA, 20 bp, synthetic construct
  misc_feature 1..20: note = Description of Artificial Sequence: Synthetic oligonucleotide
  misc_feature 1..20: note = Target: ANGPTL4; (-) strand; PAM type: YTN; PAM sequence: CTG
  source 1..20: mol_type = other DNA
agtccgccattgaggccagt

SEQ ID NO: 15428 - DNA, 20 bp, synthetic construct
  misc_feature 1..20: note = Description of Artificial Sequence: Synthetic oligonucleotide
  misc_feature 1..20: note = Target: ANGPTL4; (-) strand; PAM type: YTN; PAM sequence: CTG
  source 1..20: mol_type = other DNA
gtccccgtcagtcaatgtga

SEQ ID NO: 15429 - DNA, 20 bp, synthetic construct
  misc_feature 1..20: note = Description of Artificial Sequence: Synthetic oligonucleotide
  misc_feature 1..20: note = Target: ANGPTL4; (-) strand; PAM type: YTN; PAM sequence: CTC
  source 1..20: mol_type = other DNA
gacccacacaagccctggtc

SEQ ID NO: 15430 - DNA, 20 bp, synthetic construct
  misc_feature 1..20: note = Description of Artificial Sequence: Synthetic oligonucleotide
  misc_feature 1..20: note = Target: ANGPTL4; (-) strand; PAM type: YTN; PAM sequence: CTC
  source 1..20: mol_type = other DNA
tcgacccacacaagccctgg

SEQ ID NO: 15431 - DNA, 20 bp, synthetic construct
  misc_feature 1..20: note = Description of Artificial Sequence: Synthetic oligonucleotide
  misc_feature 1..20: note = Target: ANGPTL4; (-) strand; PAM type: YTN; PAM sequence: CTA
  source 1..20: mol_type = other DNA
cacacaacagcaccagcacc

SEQ ID NO: 15432 - DNA, 20 bp, synthetic construct
  misc_feature 1..20: note = Description of Artificial Sequence: Synthetic oligonucleotide
  misc_feature 1..20: note = Target: ANGPTL4; (-) strand; PAM type: YTN; PAM sequence: TTG
  source 1..20: mol_type = other DNA
tgtccccaggggacctacac

SEQ ID NO: 15433 - DNA, 20 bp, synthetic construct
  misc_feature 1..20: note = Description of Artificial Sequence: Synthetic oligonucleotide
  misc_feature 1..20: note = Target: ANGPTL4; (-) strand; PAM type: YTN; PAM sequence: CTT
  source 1..20: mol_type = other DNA
gtgtccccaggggacctaca

SEQ ID NO: 15434 - DNA, 20 bp, synthetic construct
  misc_feature 1..20: note = Description of Artificial Sequence: Synthetic oligonucleotide
  misc_feature 1..20: note = Target: ANGPTL4; (-) strand; PAM type: YTN; PAM sequence: CTG
  source 1..20: mol_type = other DNA
cttgtgtccccaggggacct

SEQ ID NO: 15435 - DNA, 20 bp, synthetic construct
  misc_feature 1..20: note = Description of Artificial Sequence: Synthetic oligonucleotide
  misc_feature 1..20: note = Target: ANGPTL4; (-) strand; PAM type: YTN; PAM sequence: TTG
  source 1..20: mol_type = other DNA
gcgcctgcttgtgtccccag

SEQ ID NO: 15436 - DNA, 20 bp, synthetic construct
  misc_feature 1..20: note = Description of Artificial Sequence: Synthetic oligonucleotide
  misc_feature 1..20: note = Target: ANGPTL4; (-) strand; PAM type: YTN; PAM sequence: CTC
  source 1..20: mol_type = other DNA
cgcccagataccattggcgc

SEQ ID NO: 15437 - DNA, 20 bp, synthetic construct
  misc_feature 1..20: note = Description of Artificial Sequence: Synthetic oligonucleotide
  misc_feature 1..20: note = Target: ANGPTL4; (-) strand; PAM type: YTN; PAM sequence: CTG
  source 1..20: mol_type = other DNA
tgagctccgcccagatacca

SEQ ID NO: 15438 - DNA, 20 bp, synthetic construct
  misc_feature 1..20: note = Description of Artificial Sequence: Synthetic oligonucleotide
  misc_feature 1..20: note = Target: ANGPTL4; (-) strand; PAM type: YTN; PAM sequence: CTC
  source 1..20: mol_type = other DNA
tgtgagctccgcccagatac

SEQ ID NO: 15439 - DNA, 20 bp, synthetic construct
  misc_feature 1..20: note = Description of Artificial Sequence: Synthetic oligonucleotide
  misc_feature 1..20: note = Target: ANGPTL4; (-) strand; PAM type: YTN; PAM sequence: TTC
  source 1..20: mol_type = other DNA
caagaactctgtgagctccg

SEQ ID NO: 15440 - DNA, 20 bp, synthetic construct
  misc_feature 1..20: note = Description of Artificial Sequence: Synthetic oligonucleotide
  misc_feature 1..20: note = Target: ANGPTL4; (-) strand; PAM type: YTN; PAM sequence: TTA
  source 1..20: mol_type = other DNA
ttccaagaactctgtgagct

SEQ ID NO: 15441 - DNA, 20 bp, synthetic construct
  misc_feature 1..20: note = Description of Artificial Sequence: Synthetic oligonucleotide
  misc_feature 1..20: note = Target: ANGPTL4; (-) strand; PAM type: YTN; PAM sequence: TTT
  source 1..20: mol_type = other DNA
attccaagaactctgtgagc

SEQ ID NO: 15442 - DNA, 20 bp, synthetic construct
  misc_feature 1..20: note = Description of Artificial Sequence: Synthetic oligonucleotide
  misc_feature 1..20: note = Target: ANGPTL4; (-) strand; PAM type: YTN; PAM sequence: TTT
  source 1..20: mol_type = other DNA
tattccaagaactctgtgag

SEQ ID NO: 15443 - DNA, 20 bp, synthetic construct
  misc_feature 1..20: note = Description of Artificial Sequence: Synthetic oligonucleotide
  misc_feature 1..20: note = Target: ANGPTL4; (-) strand; PAM type: YTN; PAM sequence: CTT
  source 1..20: mol_type = other DNA
ttattccaagaactctgtga

SEQ ID NO: 15444 - DNA, 20 bp, synthetic construct
  misc_feature 1..20: note = Description of Artificial Sequence: Synthetic oligonucleotide
  misc_feature 1..20: note = Target: ANGPTL4; (-) strand; PAM type: YTN; PAM sequence: TTG
  source 1..20: mol_type = other DNA
cttttattccaagaactctg

SEQ ID NO: 15445 - DNA, 20 bp, synthetic construct
  misc_feature 1..20: note = Description of Artificial Sequence: Synthetic oligonucleotide
  misc_feature 1..20: note = Target: ANGPTL4; (-) strand; PAM type: YTN; PAM sequence: CTG
  source 1..20: mol_type = other DNA
aggttgcttttattccaaga

SEQ ID NO: 15446 - DNA, 20 bp, synthetic construct
  misc_feature 1..20: note = Description of Artificial Sequence: Synthetic oligonucleotide
  misc_feature 1..20: note = Target: ANGPTL4; (-) strand; PAM type: YTN; PAM sequence: TTC
  source 1..20: mol_type = other DNA
tgaggttgcttttattccaa

SEQ ID NO: 15447 - DNA, 20 bp, synthetic construct
  misc_feature 1..20: note = Description of Artificial Sequence: Synthetic oligonucleotide
  misc_feature 1..20: note = Target: ANGPTL4; (-) strand; PAM type: YTN; PAM sequence: CTA
  source 1..20: mol_type = other DNA
aagaaagagaaaaaaaagaa

SEQ ID NO: 15448 - DNA, 20 bp, synthetic construct
  misc_feature 1..20: note = Description of Artificial Sequence: Synthetic oligonucleotide
  misc_feature 1..20: note = Target: ANGPTL4; (-) strand; PAM type: YTN; PAM sequence: CTG
  source 1..20: mol_type = other DNA
tgaactaaagaaagagaaaa

SEQ ID NO: 15449 - DNA, 20 bp, synthetic construct
  misc_feature 1..20: note = Description of Artificial Sequence: Synthetic oligonucleotide
  misc_feature 1..20: note = Target: ANGPTL4; (-) strand; PAM type: YTN; PAM sequence: CTA
  source 1..20: mol_type = other DNA
gatctgtgaactaaagaaag

SEQ ID NO: 15450 - DNA, 20 bp, synthetic construct
  misc_feature 1..20: note = Description of Artificial Sequence: Synthetic oligonucleotide
  misc_feature 1..20: note = Target: ANGPTL4; (-) strand; PAM type: YTN; PAM sequence: TTA
  source 1..20: mol_type = other DNA
ctagatctgtgaactaaaga

SEQ ID NO: 15451 - DNA, 20 bp, synthetic construct
  misc_feature 1..20: note = Description of Artificial Sequence: Synthetic oligonucleotide
  misc_feature 1..20: note = Target: ANGPTL4; (-) strand; PAM type: YTN; PAM sequence: CTT
  source 1..20: mol_type = other DNA
actagatctgtgaactaaag

SEQ ID NO: 15452 - DNA, 20 bp, synthetic construct
  misc_feature 1..20: note = Description of Artificial Sequence: Synthetic oligonucleotide
  misc_feature 1..20: note = Target: ANGPTL4; (-) strand; PAM type: YTN; PAM sequence: CTG
  source 1..20: mol_type = other DNA
agggtaacttactagatctg

SEQ ID NO: 15453 - DNA, 20 bp, synthetic construct
  misc_feature 1..20: note = Description of Artificial Sequence: Synthetic oligonucleotide
  misc_feature 1..20: note = Target: ANGPTL4; (-) strand; PAM type: YTN; PAM sequence: TTA
  source 1..20: mol_type = other DNA
aaacaaactgagggtaactt

SEQ ID NO: 15454 - DNA, 20 bp, synthetic construct
  misc_feature 1..20: note = Description of Artificial Sequence: Synthetic oligonucleotide
  misc_feature 1..20: note = Target: ANGPTL4; (-) strand; PAM type: YTN; PAM sequence: TTT
  source 1..20: mol_type = other DNA
aaaacaaactgagggtaact

SEQ ID NO: 15455 - DNA, 20 bp, synthetic construct
  misc_feature 1..20: note = Description of Artificial Sequence: Synthetic oligonucleotide
  misc_feature 1..20: note = Target: ANGPTL4; (-) strand; PAM type: YTN; PAM sequence: TTT
  source 1..20: mol_type = other DNA
taaaacaaactgagggtaac

SEQ ID NO: 15456 - DNA, 20 bp, synthetic construct
  misc_feature 1..20: note = Description of Artificial Sequence: Synthetic oligonucleotide
  misc_feature 1..20: note = Target: ANGPTL4; (-) strand; PAM type: YTN; PAM sequence: TTT
  source 1..20: mol_type = other DNA
ttaaaacaaactgagggtaa

SEQ ID NO: 15457 - DNA, 20 bp, synthetic construct
  misc_feature 1..20: note = Description of Artificial Sequence: Synthetic oligonucleotide
  misc_feature 1..20: note = Target: ANGPTL4; (-) strand; PAM type: YTN; PAM sequence: CTT
  source 1..20: mol_type = other DNA
tttaaaacaaactgagggta

SEQ ID NO: 15458 - DNA, 20 bp, synthetic construct
  misc_feature 1..20: note = Description of Artificial Sequence: Synthetic oligonucleotide
  misc_feature 1..20: note = Target: ANGPTL4; (-) strand; PAM type: YTN; PAM sequence: TTC
  source 1..20: mol_type = other DNA
actttttaaaacaaactgag

SEQ ID NO: 15459 - DNA, 20 bp, synthetic construct
  misc_feature 1..20: note = Description of Artificial Sequence: Synthetic oligonucleotide
  misc_feature 1..20: note = Target: ANGPTL4; (-) strand; PAM type: YTN; PAM sequence: TTG
  source 1..20: mol_type = other DNA
ttcactttttaaaacaaact

SEQ ID NO: 15460 - DNA, 20 bp, synthetic construct
  misc_feature 1..20: note = Description of Artificial Sequence: Synthetic oligonucleotide
  misc_feature 1..20: note = Target: ANGPTL4; (-) strand; PAM type: YTN; PAM sequence: TTT
  source 1..20: mol_type = other DNA
gttcactttttaaaacaaac

SEQ ID NO: 15461 - DNA, 20 bp, synthetic construct
  misc_feature 1..20: note = Description of Artificial Sequence: Synthetic oligonucleotide
  misc_feature 1..20: note = Target: ANGPTL4; (-) strand; PAM type: YTN; PAM sequence: CTT
  source 1..20: mol_type = other DNA
tgttcactttttaaaacaaa

SEQ ID NO: 15462 - DNA, 20 bp, synthetic construct
  misc_feature 1..20: note = Description of Artificial Sequence: Synthetic oligonucleotide
  misc_feature 1..20: note = Target: ANGPTL4; (-) strand; PAM type: YTN; PAM sequence: TTA
  source 1..20: mol_type = other DNA
catggactttgttcactttt

SEQ ID NO: 15463 - DNA, 20 bp, synthetic construct
  misc_feature 1..20: note = Description of Artificial Sequence: Synthetic oligonucleotide
  misc_feature 1..20: note = Target: ANGPTL4; (-) strand; PAM type: YTN; PAM sequence: TTT
  source 1..20: mol_type = other DNA
acatggactttgttcacttt

SEQ ID NO: 15464 - DNA, 20 bp, synthetic construct
  misc_feature 1..20: note = Description of Artificial Sequence: Synthetic oligonucleotide
  misc_feature 1..20: note = Target: ANGPTL4; (-) strand; PAM type: YTN; PAM sequence: CTG
  source 1..20: mol_type = other DNA
ggaacatgtttacatggact

SEQ ID NO: 15465 - DNA, 20 bp, synthetic construct
  misc_feature 1..20: note = Description of Artificial Sequence: Synthetic oligonucleotide
  misc_feature 1..20: note = Target: ANGPTL4; (-) strand; PAM type: YTN; PAM sequence: CTG
  source 1..20: mol_type = other DNA
gccctgggaacatgtttaca

SEQ ID NO: 15466 - DNA, 20 bp, synthetic construct
  misc_feature 1..20: note = Description of Artificial Sequence: Synthetic oligonucleotide
  misc_feature 1..20: note = Target: ANGPTL4; (-) strand; PAM type: YTN; PAM sequence: TTA
  source 1..20: mol_type = other DNA
caggcacgagacaccgtgcc

SEQ ID NO: 15467 - DNA, 20 bp, synthetic construct
  misc_feature 1..20: note = Description of Artificial Sequence: Synthetic oligonucleotide
  misc_feature 1..20: note = Target: ANGPTL4; (-) strand; PAM type: YTN; PAM sequence: CTG
  source 1..20: mol_type = other DNA
ggattacaggcacgagacac

SEQ ID NO: 15468 - DNA, 20 bp, synthetic construct
  misc_feature 1..20: note = Description of Artificial Sequence: Synthetic oligonucleotide
  misc_feature 1..20: note = Target: ANGPTL4; (-) strand; PAM type: YTN; PAM sequence: CTC
  source 1..20: mol_type = other DNA
acaaatggctgggattacag

SEQ ID NO: 15469 - DNA, 20 bp, synthetic construct
  misc_feature 1..20: note = Description of Artificial Sequence: Synthetic oligonucleotide
  misc_feature 1..20: note = Target: ANGPTL4; (-) strand; PAM type: YTN; PAM sequence: CTC
  source 1..20: mol_type = other DNA
ggcctcacaaatggctggga

SEQ ID NO: 15470 - DNA, 20 bp, synthetic construct
  misc_feature 1..20: note = Description of Artificial Sequence: Synthetic oligonucleotide
  misc_feature 1..20: note = Target: ANGPTL4; (-) strand; PAM type: YTN; PAM sequence: CTG
  source 1..20: mol_type = other DNA
tctcggcctcacaaatggct

SEQ ID NO: 15471 - DNA, 20 bp, synthetic construct
  misc_feature 1..20: note = Description of Artificial Sequence: Synthetic oligonucleotide
  misc_feature 1..20: note = Target: ANGPTL4; (-) strand; PAM type: YTN; PAM sequence: CTG
  source 1..20: mol_type = other DNA
cctgtctcggcctcacaaat

SEQ ID NO: 15472 - DNA, 20 bp, synthetic construct
  misc_feature 1..20: note = Description of Artificial Sequence: Synthetic oligonucleotide
  misc_feature 1..20: note = Target: ANGPTL4; (-) strand; PAM type: YTN; PAM sequence: CTC
  source 1..20: mol_type = other DNA
aagtgacctgcctgtctcgg

SEQ ID NO: 15473 - DNA, 20 bp, synthetic construct
  misc_feature 1..20: note = Description of Artificial Sequence: Synthetic oligonucleotide
  misc_feature 1..20: note = Target: ANGPTL4; (-) strand; PAM type: YTN; PAM sequence: CTG
  source 1..20: mol_type = other DNA
acctcaagtgacctgcctgt

SEQ ID NO: 15474 - DNA, 20 bp, synthetic construct
  misc_feature 1..20: note = Description of Artificial Sequence: Synthetic oligonucleotide
  misc_feature 1..20: note = Target: ANGPTL4; (-) strand; PAM type: YTN; PAM sequence: CTG
  source 1..20: mol_type = other DNA
ctgacctcaagtgacctgcc

SEQ ID NO: 15475 - DNA, 20 bp, synthetic construct
  misc_feature 1..20: note = Description of Artificial Sequence: Synthetic oligonucleotide
  misc_feature 1..20: note = Target: ANGPTL4; (-) strand; PAM type: YTN; PAM sequence: CTC
  source 1..20: mol_type = other DNA
gaactgctgacctcaagtga

SEQ ID NO: 15476 - DNA, 20 bp, synthetic construct
  misc_feature 1..20: note = Description of Artificial Sequence: Synthetic oligonucleotide
  misc_feature 1..20: note = Target: ANGPTL4; (-) strand; PAM type: YTN; PAM sequence: CTG
  source 1..20: mol_type = other DNA
gtctcgaactgctgacctca

SEQ ID NO: 15477 - DNA, 20 bp, synthetic construct
  misc_feature 1..20: note = Description of Artificial Sequence: Synthetic oligonucleotide
  misc_feature 1..20: note = Target: ANGPTL4; (-) strand; PAM type: YTN; PAM sequence: TTG
  source 1..20: mol_type = other DNA
gcccggctggtctcgaactg

SEQ ID NO: 15478 - DNA, 20 bp, synthetic construct
  misc_feature 1..20: note = Description of Artificial Sequence: Synthetic oligonucleotide
  misc_feature 1..20: note = Target: ANGPTL4; (-) strand; PAM type: YTN; PAM sequence: TTC
  source 1..20: mol_type = other DNA
caccatgttggcccggctgg

SEQ ID NO: 15479 - DNA, 20 bp, synthetic construct
  misc_feature 1..20: note = Description of Artificial Sequence: Synthetic oligonucleotide
  misc_feature 1..20: note = Target: ANGPTL4; (-) strand; PAM type: YTN; PAM sequence: TTG
  source 1..20: mol_type = other DNA
tagagatgggggttccacca

SEQ ID NO: 15480 - DNA, 20 bp, synthetic construct
  misc_feature 1..20: note = Description of Artificial Sequence: Synthetic oligonucleotide
  misc_feature 1..20: note = Target: ANGPTL4; (-) strand; PAM type: YTN; PAM sequence: TTT
  source 1..20: mol_type = other DNA
gtagagatgggggttccacc

SEQ ID NO: 15481 - DNA, 20 bp, synthetic construct
  misc_feature 1..20: note = Description of Artificial Sequence: Synthetic oligonucleotide
  misc_feature 1..20: note = Target: ANGPTL4; (-) strand; PAM type: YTN; PAM sequence: TTT
  source 1..20: mol_type = other DNA
tgtagagatgggggttccac

SEQ ID NO: 15482 - DNA, 20 bp, synthetic construct
  misc_feature 1..20: note = Description of Artificial Sequence: Synthetic oligonucleotide
  misc_feature 1..20: note = Target: ANGPTL4; (-) strand; PAM type: YTN; PAM sequence: TTT
  source 1..20: mol_type = other DNA
ttgtagagatgggggttcca

SEQ ID NO: 15483 - DNA, 20 bp, synthetic construct
  misc_feature 1..20: note = Description of Artificial Sequence: Synthetic oligonucleotide
  misc_feature 1..20: note = Target: ANGPTL4; (-) strand; PAM type: YTN; PAM sequence: TTT
  source 1..20: mol_type = other DNA
tttgtagagatgggggttcc

SEQ ID NO: 15484 - DNA, 20 bp, synthetic construct
  misc_feature 1..20: note = Description of Artificial Sequence: Synthetic oligonucleotide
  misc_feature 1..20: note = Target: ANGPTL4; (-) strand; PAM type: YTN; PAM sequence: TTT
  source 1..20: mol_type = other DNA
ttttgtagagatgggggttc

SEQ ID NO: 15485 - DNA, 20 bp, synthetic construct
  misc_feature 1..20: note = Description of Artificial Sequence: Synthetic oligonucleotide
  misc_feature 1..20: note = Target: ANGPTL4; (-) strand; PAM type: YTN; PAM sequence: TTG
  source 1..20: mol_type = other DNA
tatttttttgtagagatggg

SEQ ID NO: 15486 - DNA, 20 bp, synthetic construct
  misc_feature 1..20: note = Description of Artificial Sequence: Synthetic oligonucleotide
  misc_feature 1..20: note = Target: ANGPTL4; (-) strand; PAM type: YTN; PAM sequence: TTT
  source 1..20: mol_type = other DNA
gtatttttttgtagagatgg

SEQ ID NO: 15487 - DNA, 20 bp, synthetic construct
  misc_feature 1..20: note = Description of Artificial Sequence: Synthetic oligonucleotide
  misc_feature 1..20: note = Target: ANGPTL4; (-) strand; PAM type: YTN; PAM sequence: TTT
  source 1..20: mol_type = other DNA
tgtatttttttgtagagatg

SEQ ID NO: 15488 - DNA, 20 bp, synthetic construct
  misc_feature 1..20: note = Description of Artificial Sequence: Synthetic oligonucleotide
  misc_feature 1..20: note = Target: ANGPTL4; (-) strand; PAM type: YTN; PAM sequence: TTT
  source 1..20: mol_type = other DNA
ttgtatttttttgtagagat

SEQ ID NO: 15489 - DNA, 20 bp, synthetic construct
  misc_feature 1..20: note = Description of Artificial Sequence: Synthetic oligonucleotide
  misc_feature 1..20: note = Target: ANGPTL4; (-) strand; PAM type: YTN; PAM sequence: CTA
  source 1..20: mol_type = other DNA
atttttgtatttttttgtag

SEQ ID NO: 15490 - DNA, 20 bp, synthetic construct
  misc_feature 1..20: note = Description of Artificial Sequence: Synthetic oligonucleotide
  misc_feature 1..20: note = Target: ANGPTL4; (-) strand; PAM type: YTN; PAM sequence: CTC
  source 1..20: mol_type = other DNA
ggctaatttttgtatttttt

SEQ ID NO: 15491 - DNA, 20 bp, synthetic construct
  misc_feature 1..20: note = Description of Artificial Sequence: Synthetic oligonucleotide
  misc_feature 1..20: note = Target: ANGPTL4; (-) strand; PAM type: YTN; PAM sequence: CTA
  source 1..20: mol_type = other DNA
cagacgtgcaccaccatgct

SEQ ID NO: 15492 - DNA, 20 bp, synthetic construct
  misc_feature 1..20: note = Description of Artificial Sequence: Synthetic oligonucleotide
  misc_feature 1..20: note = Target: ANGPTL4; (-) strand; PAM type: YTN; PAM sequence: CTG
  source 1..20: mol_type = other DNA
ggactacagacgtgcaccac

SEQ ID NO: 15493 - DNA, 20 bp, synthetic construct
  misc_feature 1..20: note = Description of Artificial Sequence: Synthetic oligonucleotide
  misc_feature 1..20: note = Target: ANGPTL4; (-) strand; PAM type: YTN; PAM sequence: CTA
  source 1..20: mol_type = other DNA
gagtagctgggactacagac

SEQ ID NO: 15494 - DNA, 20 bp, synthetic construct
  misc_feature 1..20: note = Description of Artificial Sequence: Synthetic oligonucleotide
  misc_feature 1..20: note = Target: ANGPTL4; (-) strand; PAM type: YTN; PAM sequence: CTC
  source 1..20: mol_type = other DNA
tagagtagctgggactacag

SEQ ID NO: 15495 - DNA, 20 bp, synthetic construct
  misc_feature 1..20: note = Description of Artificial Sequence: Synthetic oligonucleotide
  misc_feature 1..20: note = Target: ANGPTL4; (-) strand; PAM type: YTN; PAM sequence: CTG
  source 1..20: mol_type = other DNA
cgtcagcctctagagtagct

SEQ ID NO: 15496 - DNA, 20 bp, synthetic construct
  misc_feature 1..20: note = Description of Artificial Sequence: Synthetic oligonucleotide
  misc_feature 1..20: note = Target: ANGPTL4; (-) strand; PAM type: YTN; PAM sequence: TTC
  source 1..20: mol_type = other DNA
tgcgtcagcctctagagtag

SEQ ID NO: 15497 - DNA, 20 bp, synthetic construct
  misc_feature 1..20: note = Description of Artificial Sequence: Synthetic oligonucleotide
  misc_feature 1..20: note = Target: ANGPTL4; (-) strand; PAM type: YTN; PAM sequence: CTT
  source 1..20: mol_type = other DNA
ctgcgtcagcctctagagta

SEQ ID NO: 15498 - DNA, 20 bp, synthetic construct
  misc_feature 1..20: note = Description of Artificial Sequence: Synthetic oligonucleotide
  misc_feature 1..20: note = Target: ANGPTL4; (-) strand; PAM type: YTN; PAM sequence: TTC
  source 1..20: mol_type = other DNA
ttctgcgtcagcctctagag

SEQ ID NO: 15499 - DNA, 20 bp, synthetic construct
  misc_feature 1..20: note = Description of Artificial Sequence: Synthetic oligonucleotide
  misc_feature 1..20: note = Target: ANGPTL4; (-) strand; PAM type: YTN; PAM sequence: CTC
  source 1..20: mol_type = other DNA
aagtgattcttctgcgtcag

SEQ ID NO: 15500 - DNA, 20 bp, synthetic construct
  misc_feature 1..20: note = Description of Artificial Sequence: Synthetic oligonucleotide
  misc_feature 1..20: note = Target: ANGPTL4; (-) strand; PAM type: YTN; PAM sequence: TTG
  source 1..20: mol_type = other DNA
gctcaagtgattcttctgcg

SEQ ID NO: 15501 - DNA, 20 bp, synthetic construct
  misc_feature 1..20: note = Description of Artificial Sequence: Synthetic oligonucleotide
  misc_feature 1..20: note = Target: ANGPTL4; (-) strand; PAM type: YTN; PAM sequence: CTT
  source 1..20: mol_type = other DNA
ggctcaagtgattcttctgc

SEQ ID NO: 15502 - DNA, 20 bp, synthetic construct
  misc_feature 1..20: note = Description of Artificial Sequence: Synthetic oligonucleotide
  misc_feature 1..20: note = Target: ANGPTL4; (-) strand; PAM type: YTN; PAM sequence: CTC
  source 1..20: mol_type = other DNA
cttggctcaagtgattcttc

SEQ ID NO: 15503 - DNA, 20 bp, synthetic construct
  misc_feature 1..20: note = Description of Artificial Sequence: Synthetic oligonucleotide
  misc_feature 1..20: note = Target: ANGPTL4; (-) strand; PAM type: YTN; PAM sequence: CTG
  source 1..20: mol_type = other DNA
cctccttggctcaagtgatt

SEQ ID NO: 15504 - DNA, 20 bp, synthetic construct
  misc_feature 1..20: note = Description of Artificial Sequence: Synthetic oligonucleotide
  misc_feature 1..20: note = Target: ANGPTL4; (-) strand; PAM type: YTN; PAM sequence: CTC
  source 1..20: mol_type = other DNA
tgcctccttggctcaagtga

SEQ ID NO: 15505 - DNA, 20 bp, synthetic construct
  misc_feature 1..20: note = Description of Artificial Sequence: Synthetic oligonucleotide
  misc_feature 1..20: note = Target: ANGPTL4; (-) strand; PAM type: YTN; PAM sequence: TTG
  source 1..20: mol_type = other DNA
cagcctctgcctccttggct

SEQ ID NO: 15506 - DNA, 20 bp, synthetic construct
  misc_feature 1..20: note = Description of Artificial Sequence: Synthetic oligonucleotide
  misc_feature 1..20: note = Target: ANGPTL4; (-) strand; PAM type: YTN; PAM sequence: TTT
  source 1..20: mol_type = other DNA
gcagcctctgcctccttggc

SEQ ID NO: 15507 - DNA, 20 bp, synthetic construct
  misc_feature 1..20: note = Description of Artificial Sequence: Synthetic oligonucleotide
  misc_feature 1..20: note = Target: ANGPTL4; (-) strand; PAM type: YTN; PAM sequence: TTA
  source 1..20: mol_type = other DNA
tttgcagcctctgcctcctt

SEQ ID NO: 15508 - DNA, 20 bp, synthetic construct
  misc_feature 1..20: note = Description of Artificial Sequence: Synthetic oligonucleotide
  misc_feature 1..20: note = Target: ANGPTL4; (-) strand; PAM type: YTN; PAM sequence: CTT
  source 1..20: mol_type = other DNA
atttgcagcctctgcctcct

SEQ ID NO: 15509 - DNA, 20 bp, synthetic construct
  misc_feature 1..20: note = Description of Artificial Sequence: Synthetic oligonucleotide
  misc_feature 1..20: note = Target: ANGPTL4; (-) strand; PAM type: YTN; PAM sequence: CTC
  source 1..20: mol_type = other DNA
ggcttatttgcagcctctgc

SEQ ID NO: 15510 - DNA, 20 bp, synthetic construct
  misc_feature 1..20: note = Description of Artificial Sequence: Synthetic oligonucleotide
  misc_feature 1..20: note = Target: ANGPTL4; (-) strand; PAM type: YTN; PAM sequence: CTG
  source 1..20: mol_type = other DNA
gagtgcagtggcgcaatctc

SEQ ID NO: 15511 - DNA, 20 bp, synthetic construct
  misc_feature 1..20: note = Description of Artificial Sequence: Synthetic oligonucleotide
  misc_feature 1..20: note = Target: ANGPTL4; (-) strand; PAM type: YTN; PAM sequence: TTG
  source 1..20: mol_type = other DNA
cccaggctggagtgcagtgg

SEQ ID NO: 15512 - DNA, 20 bp, synthetic construct
  misc_feature 1..20: note = Description of Artificial Sequence: Synthetic oligonucleotide
  misc_feature 1..20: note = Target: ANGPTL4; (-) strand; PAM type: YTN; PAM sequence: CTG
  source 1..20: mol_type = other DNA
ttgcccaggctggagtgcag

SEQ ID NO: 15513 - DNA, 20 bp, synthetic construct
  misc_feature 1..20: note = Description of Artificial Sequence: Synthetic oligonucleotide
  misc_feature 1..20: note = Target: ANGPTL4; (-) strand; PAM type: YTN; PAM sequence: CTC
  source 1..20: mol_type = other DNA
tgttgcccaggctggagtgc

SEQ ID NO: 15514 - DNA, 20 bp, synthetic construct
  misc_feature 1..20: note = Description of Artificial Sequence: Synthetic oligonucleotide
  misc_feature 1..20: note = Target: ANGPTL4; (-) strand; PAM type: YTN; PAM sequence: TTG
  source 1..20: mol_type = other DNA
ctctgttgcccaggctggag

SEQ ID NO: 15515 - DNA, 20 bp, synthetic construct
  misc_feature 1..20: note = Description of Artificial Sequence: Synthetic oligonucleotide
  misc_feature 1..20: note = Target: ANGPTL4; (-) strand; PAM type: YTN; PAM sequence: CTT
  source 1..20: mol_type = other DNA
gctctgttgcccaggctgga

SEQ ID NO: 15516 - DNA, 20 bp, synthetic construct
  misc_feature 1..20: note = Description of Artificial Sequence: Synthetic oligonucleotide
  misc_feature 1..20: note = Target: ANGPTL4; (-) strand; PAM type: YTN; PAM sequence: TTG
  source 1..20: mol_type = other DNA
agatggagtcttgctctgtt

SEQ ID NO: 15517 - DNA, 20 bp, synthetic construct
  misc_feature 1..20: note = Description of Artificial Sequence: Synthetic oligonucleotide
  misc_feature 1..20: note = Target: ANGPTL4; (-) strand; PAM type: YTN; PAM sequence: TTT
  source 1..20: mol_type = other DNA
gagatggagtcttgctctgt

SEQ ID NO: 15518 - DNA, 20 bp, synthetic construct
  misc_feature 1..20: note = Description of Artificial Sequence: Synthetic oligonucleotide
  misc_feature 1..20: note = Target: ANGPTL4; (-) strand; PAM type: YTN; PAM sequence: TTT
  source 1..20: mol_type = other DNA
tgagatggagtcttgctctg

SEQ ID NO: 15519 - DNA, 20 bp, synthetic construct
  misc_feature 1..20: note = Description of Artificial Sequence: Synthetic oligonucleotide
  misc_feature 1..20: note = Target: ANGPTL4; (-) strand; PAM type: YTN; PAM sequence: TTG
  source 1..20: mol_type = other DNA
ttttgagatggagtcttgct

SEQ ID NO: 15520 - DNA, 20 bp, synthetic construct
  misc_feature 1..20: note = Description of Artificial Sequence: Synthetic oligonucleotide
  misc_feature 1..20: note = Target: ANGPTL4; (-) strand; PAM type: YTN; PAM sequence: TTT
  source 1..20: mol_type = other DNA
gttttgagatggagtcttgc

SEQ ID NO: 15521 - DNA, 20 bp, synthetic construct
  misc_feature 1..20: note = Description of Artificial Sequence: Synthetic oligonucleotide
  misc_feature 1..20: note = Target: ANGPTL4; (-) strand; PAM type: YTN; PAM sequence: TTT
  source 1..20: mol_type = other DNA
tgttttgagatggagtcttg

SEQ ID NO: 15522 - DNA, 20 bp, synthetic construct
  misc_feature 1..20: note = Description of Artificial Sequence: Synthetic oligonucleotide
  misc_feature 1..20: note = Target: ANGPTL4; (-) strand; PAM type: YTN; PAM sequence: TTT
  source 1..20: mol_type = other DNA
ttgttttgagatggagtctt

SEQ ID NO: 15523 - DNA, 20 bp, synthetic construct
  misc_feature 1..20: note = Description of Artificial Sequence: Synthetic oligonucleotide
  misc_feature 1..20: note = Target: ANGPTL4; (-) strand; PAM type: YTN; PAM sequence: TTA
  source 1..20: mol_type = other DNA
tttttgttttgagatggagt

SEQ ID NO: 15524 - DNA, 20 bp, synthetic construct
  misc_feature 1..20: note = Description of Artificial Sequence: Synthetic oligonucleotide
  misc_feature 1..20: note = Target: ANGPTL4; (-) strand; PAM type: YTN; PAM sequence: CTA
  source 1..20: mol_type = other DNA
cgaaaaaaaaattatttttg

SEQ ID NO: 15525 - DNA, 20 bp, synthetic construct
  misc_feature 1..20: note = Description of Artificial Sequence: Synthetic oligonucleotide
  misc_feature 1..20: note = Target: ANGPTL4; (-) strand; PAM type: YTN; PAM sequence: CTC
  source 1..20: mol_type = other DNA
tacgaaaaaaaaattatttt

SEQ ID NO: 15526 - DNA, 20 bp, synthetic construct
  misc_feature 1..20: note = Description of Artificial Sequence: Synthetic oligonucleotide
  misc_feature 1..20: note = Target: ANGPTL4; (-) strand; PAM type: YTN; PAM sequence: CTG
  source 1..20: mol_type = other DNA
cctctacgaaaaaaaaatta

SEQ ID NO: 15527 - DNA, 20 bp, synthetic construct
  misc_feature 1..20: note = Description of Artificial Sequence: Synthetic oligonucleotide
  misc_feature 1..20: note = Target: ANGPTL4; (-) strand; PAM type: YTN; PAM sequence: CTG
  source 1..20: mol_type = other DNA
gacaatagaatgagaccctg

SEQ ID NO: 15528 - DNA, 20 bp, synthetic construct
  misc_feature 1..20: note = Description of Artificial Sequence: Synthetic oligonucleotide
  misc_feature 1..20: note = Target: ANGPTL4; (-) strand; PAM type: YTN; PAM sequence: TTG
  source 1..20: mol_type = other DNA
agaccagcctggacaataga

SEQ ID NO: 15529 - DNA, 20 bp, synthetic construct
  misc_feature 1..20: note = Description of Artificial Sequence: Synthetic oligonucleotide
  misc_feature 1..20: note = Target: ANGPTL4; (-) strand; PAM type: YTN; PAM sequence: TTT
  source 1..20: mol_type = other DNA
gagaccagcctggacaatag

SEQ ID NO: 15530 - DNA, 20 bp, synthetic construct
  misc_feature 1..20: note = Description of Artificial Sequence: Synthetic oligonucleotide
  misc_feature 1..20: note = Target: ANGPTL4; (-) strand; PAM type: YTN; PAM sequence: CTC
  source 1..20: mol_type = other DNA
ggtgtttgagaccagcctgg

SEQ ID NO: 15531 - DNA, 20 bp, synthetic construct
  misc_feature 1..20: note = Description of Artificial Sequence: Synthetic oligonucleotide
  misc_feature 1..20: note = Target: ANGPTL4; (-) strand; PAM type: YTN; PAM sequence: TTG
  source 1..20: mol_type = other DNA
agtctcggtgtttgagacca

SEQ ID NO: 15532 - DNA, 20 bp, synthetic construct
  misc_feature 1..20: note = Description of Artificial Sequence: Synthetic oligonucleotide
  misc_feature 1..20: note = Target: ANGPTL4; (-) strand; PAM type: YTN; PAM sequence: CTT
  source 1..20: mol_type = other DNA
gagtctcggtgtttgagacc

SEQ ID NO: 15533 - DNA, 20 bp, synthetic construct
  misc_feature 1..20: note = Description of Artificial Sequence: Synthetic oligonucleotide
  misc_feature 1..20: note = Target: ANGPTL4; (-) strand; PAM type: YTN; PAM sequence: TTG
  source 1..20: mol_type = other DNA
tgaagccaaggcaggaggat

SEQ ID NO: 15534 - DNA, 20 bp, synthetic construct
  misc_feature 1..20: note = Description of Artificial Sequence: Synthetic oligonucleotide
  misc_feature 1..20: note = Target: ANGPTL4; (-) strand; PAM type: YTN; PAM sequence: TTT
  source 1..20: mol_type = other DNA
gtgaagccaaggcaggagga

SEQ ID NO: 15535 - DNA, 20 bp, synthetic construct
  misc_feature 1..20: note = Description of Artificial Sequence: Synthetic oligonucleotide
  misc_feature 1..20: note = Target: ANGPTL4; (-) strand; PAM type: YTN; PAM sequence: CTT
  source 1..20: mol_type = other DNA
tgtgaagccaaggcaggagg

SEQ ID NO: 15536 - DNA, 20 bp, synthetic construct
  misc_feature 1..20: note = Description of Artificial Sequence: Synthetic oligonucleotide
  misc_feature 1..20: note = Target: ANGPTL4; (-) strand; PAM type: YTN; PAM sequence: TTA
  source 1..20: mol_type = other DNA
atcccatcactttgtgaagc

SEQ ID NO: 15537 - DNA, 20 bp, synthetic construct
  misc_feature 1..20: note = Description of Artificial Sequence: Synthetic oligonucleotide
  misc_feature 1..20: note = Target: ANGPTL4; (-) strand; PAM type: YTN; PAM sequence: TTT
  source 1..20: mol_type = other DNA
aatcccatcactttgtgaag

SEQ ID NO: 15538 - DNA, 20 bp, synthetic construct
  misc_feature 1..20: note = Description of Artificial Sequence: Synthetic oligonucleotide
  misc_feature 1..20: note = Target: ANGPTL4; (-) strand; PAM type: YTN; PAM sequence: CTT
  source 1..20: mol_type = other DNA
taatcccatcactttgtgaa

SEQ ID NO: 15539 - DNA, 20 bp, synthetic construct
  misc_feature 1..20: note = Description of Artificial Sequence: Synthetic oligonucleotide
  misc_feature 1..20: note = Target: ANGPTL4; (-) strand; PAM type: YTN; PAM sequence: CTC
  source 1..20: mol_type = other DNA
acacctttaatcccatcact

SEQ ID NO: 15540 - DNA, 20 bp, synthetic construct
  misc_feature 1..20: note = Description of Artificial Sequence: Synthetic oligonucleotide
  misc_feature 1..20: note = Target: ANGPTL4; (-) strand; PAM type: YTN; PAM sequence: TTC
  source 1..20: mol_type = other DNA
aggggtgggtgcagtggcgc

SEQ ID NO: 15541 - DNA, 20 bp, synthetic construct
  misc_feature 1..20: note = Description of Artificial Sequence: Synthetic oligonucleotide
  misc_feature 1..20: note = Target: ANGPTL4; (-) strand; PAM type: YTN; PAM sequence: CTT
  source 1..20: mol_type = other DNA
caggggtgggtgcagtggcg

SEQ ID NO: 15542 - DNA, 20 bp, synthetic construct
  misc_feature 1..20: note = Description of Artificial Sequence: Synthetic oligonucleotide
  misc_feature 1..20: note = Target: ANGPTL4; (-) strand; PAM type: YTN; PAM sequence: TTA
  source 1..20: mol_type = other DNA
gagccttcaggggtgggtgc

SEQ ID NO: 15543 - DNA, 20 bp, synthetic construct
  misc_feature 1..20: note = Description of Artificial Sequence: Synthetic oligonucleotide
  misc_feature 1..20: note = Target: ANGPTL4; (-) strand; PAM type: YTN; PAM sequence: TTA
  source 1..20: mol_type = other DNA
acaaaacacagatgtagaat

SEQ ID NO: 15544 - DNA, 20 bp, synthetic construct
  misc_feature 1..20: note = Description of Artificial Sequence: Synthetic oligonucleotide
  misc_feature 1..20: note = Target: ANGPTL4; (-) strand; PAM type: YTN; PAM sequence: TTT
  source 1..20: mol_type = other DNA
aacaaaacacagatgtagaa

SEQ ID NO: 15545 - DNA, 20 bp, synthetic construct
  misc_feature 1..20: note = Description of Artificial Sequence: Synthetic oligonucleotide
  misc_feature 1..20: note = Target: ANGPTL4; (-) strand; PAM type: YTN; PAM sequence: TTT
  source 1..20: mol_type = other DNA
taacaaaacacagatgtaga

SEQ ID NO: 15546 - DNA, 20 bp, synthetic construct
  misc_feature 1..20: note = Description of Artificial Sequence: Synthetic oligonucleotide
  misc_feature 1..20: note = Target: ANGPTL4; (-) strand; PAM type: YTN; PAM sequence: TTT
  source 1..20: mol_type = other DNA
ttaacaaaacacagatgtag

SEQ ID NO: 15547 - DNA, 20 bp, synthetic construct
  misc_feature 1..20: note = Description of Artificial Sequence: Synthetic oligonucleotide
  misc_feature 1..20: note = Target: ANGPTL4; (-) strand; PAM type: YTN; PAM sequence: TTT
  source 1..20: mol_type = other DNA
tttaacaaaacacagatgta

SEQ ID NO: 15548 - DNA, 20 bp, synthetic construct
  misc_feature 1..20: note = Description of Artificial Sequence: Synthetic oligonucleotide
  misc_feature 1..20: note = Target: ANGPTL4; (-) strand; PAM type: YTN; PAM sequence: TTT
  source 1..20: mol_type = other DNA
ttttaacaaaacacagatgt

SEQ ID NO: 15549 - DNA, 20 bp, synthetic construct
  misc_feature 1..20: note = Description of Artificial Sequence: Synthetic oligonucleotide
  misc_feature 1..20: note = Target: ANGPTL4; (-) strand; PAM type: YTN; PAM sequence: TTT
  source 1..20: mol_type = other DNA
tttttaacaaaacacagatg

SEQ ID NO: 15550 - DNA, 20 bp, synthetic construct
  misc_feature 1..20: note = Description of Artificial Sequence: Synthetic oligonucleotide
  misc_feature 1..20: note = Target: ANGPTL4; (-) strand; PAM type: YTN; PAM sequence: TTT
  source 1..20: mol_type = other DNA
ttttttaacaaaacacagat

SEQ ID NO: 15551 - DNA, 20 bp, synthetic construct
  misc_feature 1..20: note = Description of Artificial Sequence: Synthetic oligonucleotide
  misc_feature 1..20: note = Target: ANGPTL4; (-) strand; PAM type: YTN; PAM sequence: TTT
  source 1..20: mol_type = other DNA
tttttttaacaaaacacaga

SEQ ID NO: 15552 - DNA, 20 bp, synthetic construct
  misc_feature 1..20: note = Description of Artificial Sequence: Synthetic oligonucleotide
  misc_feature 1..20: note = Target: ANGPTL4; (-) strand; PAM type: YTN; PAM sequence: TTT
  source 1..20: mol_type = other DNA
ttttttttaacaaaacacag

SEQ ID NO: 15553 - DNA, 20 bp, synthetic construct
  misc_feature 1..20: note = Description of Artificial Sequence: Synthetic oligonucleotide
  misc_feature 1..20: note = Target: ANGPTL4; (-) strand; PAM type: YTN; PAM sequence: TTT
  source 1..20: mol_type = other DNA
tttttttttaacaaaacaca

SEQ ID NO: 15554 - DNA, 20 bp, synthetic construct
  misc_feature 1..20: note = Description of Artificial Sequence: Synthetic oligonucleotide
  misc_feature 1..20: note = Target: ANGPTL4; (-) strand; PAM type: YTN; PAM sequence: TTT
  source 1..20: mol_type = other DNA
ttttttttttaacaaaacac

SEQ ID NO: 15555 - DNA, 20 bp, synthetic construct
  misc_feature 1..20: note = Description of Artificial Sequence: Synthetic oligonucleotide
  misc_feature 1..20: note = Target: ANGPTL4; (-) strand; PAM type: YTN; PAM sequence: TTT
  source 1..20: mol_type = other DNA
tttttttttttaacaaaaca

SEQ ID NO: 15556 - DNA, 20 bp, synthetic construct
  misc_feature 1..20: note = Description of Artificial Sequence: Synthetic oligonucleotide
  misc_feature 1..20: note = Target: ANGPTL4; (-) strand; PAM type: YTN; PAM sequence: TTT
  source 1..20: mol_type = other DNA
ttttttttttttaacaaaac

SEQ ID NO: 15557 - DNA, 20 bp, synthetic construct
  misc_feature 1..20: note = Description of Artificial Sequence: Synthetic oligonucleotide
  misc_feature 1..20: note = Target: ANGPTL4; (-) strand; PAM type: YTN; PAM sequence: TTT
  source 1..20: mol_type = other DNA
tttttttttttttaacaaaa

SEQ ID NO: 15558 - DNA, 20 bp, synthetic construct
  misc_feature 1..20: note = Description of Artificial Sequence: Synthetic oligonucleotide
  misc_feature 1..20: note = Target: ANGPTL4; (-) strand; PAM type: YTN; PAM sequence: CTT
  source 1..20: mol_type = other DNA
ttttttttttttttaacaaa

SEQ ID NO: 15559 - DNA, 20 bp, synthetic construct
  misc_feature 1..20: note = Description of Artificial Sequence: Synthetic oligonucleotide
  misc_feature 1..20: note = Target: ANGPTL4; (-) strand; PAM type: YTN; PAM sequence: TTA
  source 1..20: mol_type = other DNA
caggcatgagcgaccacgcc

SEQ ID NO: 15560 - DNA, 20 bp, synthetic construct
  misc_feature 1..20: note = Description of Artificial Sequence: Synthetic oligonucleotide
  misc_feature 1..20: note = Target: ANGPTL4; (-) strand; PAM type: YTN; PAM sequence: CTG
  source 1..20: mol_type = other DNA
ggattacaggcatgagcgac

SEQ ID NO: 15561 - DNA, 20 bp, synthetic construct
  misc_feature 1..20: note = Description of Artificial Sequence: Synthetic oligonucleotide
  misc_feature 1..20: note = Target: ANGPTL4; (-) strand; PAM type: YTN; PAM sequence: CTA
  source 1..20: mol_type = other DNA
aagtgctgggattacaggca

SEQ ID NO: 15562 - DNA, 20 bp, synthetic construct
  misc_feature 1..20: note = Description of Artificial Sequence: Synthetic oligonucleotide
  misc_feature 1..20: note = Target: ANGPTL4; (-) strand; PAM type: YTN; PAM sequence: CTC
  source 1..20: mol_type = other DNA
ctaaagtgctgggattacag

SEQ ID NO: 15563 - DNA, 20 bp, synthetic construct
  misc_feature 1..20: note = Description of Artificial Sequence: Synthetic oligonucleotide
  misc_feature 1..20: note = Target: ANGPTL4; (-) strand; PAM type: YTN; PAM sequence: CTC
  source 1..20: mol_type = other DNA
ggcctcctaaagtgctggga

SEQ ID NO: 15564 - DNA, 20 bp, synthetic construct
  misc_feature 1..20: note = Description of Artificial Sequence: Synthetic oligonucleotide
  misc_feature 1..20: note = Target: ANGPTL4; (-) strand; PAM type: YTN; PAM sequence: CTG
  source 1..20: mol_type = other DNA
cctcggcctcctaaagtgct

SEQ ID NO: 15565 - DNA, 20 bp, synthetic construct
  misc_feature 1..20: note = Description of Artificial Sequence: Synthetic oligonucleotide
  misc_feature 1..20: note = Target: ANGPTL4; (-) strand; PAM type: YTN; PAM sequence: CTC
  source 1..20: mol_type = other DNA
gtaatgtcagatgatccacc

SEQ ID NO: 15566 - DNA, 20 bp, synthetic construct
  misc_feature 1..20: note = Description of Artificial Sequence: Synthetic oligonucleotide
  misc_feature 1..20: note = Target: ANGPTL4; (-) strand; PAM type: YTN; PAM sequence: CTG
  source 1..20: mol_type = other DNA
gaactcgtaatgtcagatga

SEQ ID NO: 15567 - DNA, 20 bp, synthetic construct
  misc_feature 1..20: note = Description of Artificial Sequence: Synthetic oligonucleotide
  misc_feature 1..20: note = Target: ANGPTL4; (-) strand; PAM type: YTN; PAM sequence: TTG
  source 1..20: mol_type = other DNA
gtcaggcgggcctggaactc

SEQ ID NO: 15568 - DNA, 20 bp, synthetic construct
  misc_feature 1..20: note = Description of Artificial Sequence: Synthetic oligonucleotide
  misc_feature 1..20: note = Target: ANGPTL4; (-) strand; PAM type: YTN; PAM sequence: TTC
  source 1..20: mol_type = other DNA
accatgttggtcaggcgggc

SEQ ID NO: 15569 - DNA, 20 bp, synthetic construct
  misc_feature 1..20: note = Description of Artificial Sequence: Synthetic oligonucleotide
  misc_feature 1..20: note = Target: ANGPTL4; (-) strand; PAM type: YTN; PAM sequence: TTT
  source 1..20: mol_type = other DNA
caccatgttggtcaggcggg

SEQ ID NO: 15570 - DNA, 20 bp, synthetic construct
  misc_feature 1..20: note = Description of Artificial Sequence: Synthetic oligonucleotide
  misc_feature 1..20: note = Target: ANGPTL4; (-) strand; PAM type: YTN; PAM sequence: TTA
  source 1..20: mol_type = other DNA
gtagagacggggtttcacca

SEQ ID NO: 15571 - DNA, 20 bp, synthetic construct
  misc_feature 1..20: note = Description of Artificial Sequence: Synthetic oligonucleotide
  misc_feature 1..20: note = Target: ANGPTL4; (-) strand; PAM type: YTN; PAM sequence: TTT
  source 1..20: mol_type = other DNA
agtagagacggggtttcacc

SEQ ID NO: 15572 - DNA, 20 bp, synthetic construct
  misc_feature 1..20: note = Description of Artificial Sequence: Synthetic oligonucleotide
  misc_feature 1..20: note = Target: ANGPTL4; (-) strand; PAM type: YTN; PAM sequence: TTT
  source 1..20: mol_type = other DNA
tagtagagacggggtttcac

SEQ ID NO: 15573 - DNA, 20 bp, synthetic construct
  misc_feature 1..20: note = Description of Artificial Sequence: Synthetic oligonucleotide
  misc_feature 1..20: note = Target: ANGPTL4; (-) strand; PAM type: YTN; PAM sequence: TTT
  source 1..20: mol_type = other DNA
ttagtagagacggggtttca

SEQ ID NO: 15574 - DNA, 20 bp, synthetic construct
  misc_feature 1..20: note = Description of Artificial Sequence: Synthetic oligonucleotide
  misc_feature 1..20: note = Target: ANGPTL4; (-) strand; PAM type: YTN; PAM sequence: TTG
  source 1..20: mol_type = other DNA
tatttttagtagagacgggg

SEQ ID NO: 15575 - DNA, 20 bp, synthetic construct
  misc_feature 1..20: note = Description of Artificial Sequence: Synthetic oligonucleotide
  misc_feature 1..20: note = Target: ANGPTL4; (-) strand; PAM type: YTN; PAM sequence: TTT
  source 1..20: mol_type = other DNA
gtatttttagtagagacggg

SEQ ID NO: 15576 - DNA, 20 bp, synthetic construct
  misc_feature 1..20: note = Description of Artificial Sequence: Synthetic oligonucleotide
  misc_feature 1..20: note = Target: ANGPTL4; (-) strand; PAM type: YTN; PAM sequence: TTT
  source 1..20: mol_type = other DNA
tgtatttttagtagagacgg

SEQ ID NO: 15577 - DNA, 20 bp, synthetic construct
  misc_feature 1..20: note = Description of Artificial Sequence: Synthetic oligonucleotide
  misc_feature 1..20: note = Target: ANGPTL4; (-) strand; PAM type: YTN; PAM sequence: TTT
  source 1..20: mol_type = other DNA
ttgtatttttagtagagacg

SEQ ID NO: 15578 - DNA, 20 bp, synthetic construct
  misc_feature 1..20: note = Description of Artificial Sequence: Synthetic oligonucleotide
  misc_feature 1..20: note = Target: ANGPTL4; (-) strand; PAM type: YTN; PAM sequence: CTA
  source 1..20: mol_type = other DNA
atttttgtatttttagtaga

SEQ ID NO: 15579 - DNA, 20 bp, synthetic construct
  misc_feature 1..20: note = Description of Artificial Sequence: Synthetic oligonucleotide
  misc_feature 1..20: note = Target: ANGPTL4; (-) strand; PAM type: YTN; PAM sequence: TTA
  source 1..20: mol_type = other DNA
caggcacccgccaccacacc

SEQ ID NO: 15580 - DNA, 20 bp, synthetic construct
  misc_feature 1..20: note = Description of Artificial Sequence: Synthetic oligonucleotide
  misc_feature 1..20: note = Target: ANGPTL4; (-) strand; PAM type: YTN; PAM sequence: CTG
  source 1..20: mol_type = other DNA
ggattacaggcacccgccac

SEQ ID NO: 15581 - DNA, 20 bp, synthetic construct
  misc_feature 1..20: note = Description of Artificial Sequence: Synthetic oligonucleotide
  misc_feature 1..20: note = Target: ANGPTL4; (-) strand; PAM type: YTN; PAM sequence: CTG
  source 1..20: mol_type = other DNA
agtagctgggattacaggca

SEQ ID NO: 15582 - DNA, 20 bp, synthetic construct
  misc_feature 1..20: note = Description of Artificial Sequence: Synthetic oligonucleotide
  misc_feature 1..20: note = Target: ANGPTL4; (-) strand; PAM type: YTN; PAM sequence: CTC
  source 1..20: mol_type = other DNA
ctgagtagctgggattacag

SEQ ID NO: 15583 - DNA, 20 bp, synthetic construct
  misc_feature 1..20: note = Description of Artificial Sequence: Synthetic oligonucleotide
  misc_feature 1..20: note = Target: ANGPTL4; (-) strand; PAM type: YTN; PAM sequence: CTC
  source 1..20: mol_type = other DNA
agcctcctgagtagctggga

SEQ ID NO: 15584 - DNA, 20 bp, synthetic construct
  misc_feature 1..20: note = Description of Artificial Sequence: Synthetic oligonucleotide
  misc_feature 1..20: note = Target: ANGPTL4; (-) strand; PAM type: YTN; PAM sequence: CTG
  source 1..20: mol_type = other DNA
cctcagcctcctgagtagct

SEQ ID NO: 15585 - DNA, 20 bp, synthetic construct
  misc_feature 1..20: note = Description of Artificial Sequence: Synthetic oligonucleotide
  misc_feature 1..20: note = Target: ANGPTL4; (-) strand; PAM type: YTN; PAM sequence: CTC
  source 1..20: mol_type = other DNA
ctgcctcagcctcctgagta

SEQ ID NO: 15586 - DNA, 20 bp, synthetic construct
  misc_feature 1..20: note = Description of Artificial Sequence: Synthetic oligonucleotide
  misc_feature 1..20: note = Target: ANGPTL4; (-) strand; PAM type: YTN; PAM sequence: TTC
  source 1..20: mol_type = other DNA
tcctgcctcagcctcctgag

SEQ ID NO: 15587 - DNA, 20 bp, synthetic construct
  misc_feature 1..20: note = Description of Artificial Sequence: Synthetic oligonucleotide
  misc_feature 1..20: note = Target: ANGPTL4; (-) strand; PAM type: YTN; PAM sequence: TTC
  source 1..20: mol_type = other DNA
aagtgattctcctgcctcag

SEQ ID NO: 15588 - DNA, 20 bp, synthetic construct
  misc_feature 1..20: note = Description of Artificial Sequence: Synthetic oligonucleotide
  misc_feature 1..20: note = Target: ANGPTL4; (-) strand; PAM type: YTN; PAM sequence: CTC
  source 1..20: mol_type = other DNA
ccgagttcaagtgattctcc

SEQ ID NO: 15589 - DNA, 20 bp, synthetic construct
  misc_feature 1..20: note = Description of Artificial Sequence: Synthetic oligonucleotide
  misc_feature 1..20: note = Target: ANGPTL4; (-) strand; PAM type: YTN; PAM sequence: CTC
  source 1..20: mol_type = other DNA
cacctcccgagttcaagtga

SEQ ID NO: 15590 - DNA, 20 bp, synthetic construct
  misc_feature 1..20: note = Description of Artificial Sequence: Synthetic oligonucleotide
  misc_feature 1..20: note = Target: ANGPTL4; (-) strand; PAM type: YTN; PAM sequence: CTC
  source 1..20: mol_type = other DNA
accgcaacctccacctcccg

SEQ ID NO: 15591 - DNA, 20 bp, synthetic construct
  misc_feature 1..20: note = Description of Artificial Sequence: Synthetic oligonucleotide
  misc_feature 1..20: note = Target: ANGPTL4; (-) strand; PAM type: YTN; PAM sequence: CTG
  source 1..20: mol_type = other DNA
ctcaccgcaacctccacctc

SEQ ID NO: 15592 - DNA, 20 bp, synthetic construct
  misc_feature 1..20: note = Description of Artificial Sequence: Synthetic oligonucleotide
  misc_feature 1..20: note = Target: ANGPTL4; (-) strand; PAM type: YTN; PAM sequence: CTC
  source 1..20: mol_type = other DNA
tgctcaccgcaacctccacc

SEQ ID NO: 15593 - DNA, 20 bp, synthetic construct
  misc_feature 1..20: note = Description of Artificial Sequence: Synthetic oligonucleotide
  misc_feature 1..20: note = Target: ANGPTL4; (-) strand; PAM type: YTN; PAM sequence: CTG
  source 1..20: mol_type = other DNA
gagtgcagtggcatgatctc

SEQ ID NO: 15594 - DNA, 20 bp, synthetic construct
  misc_feature 1..20: note = Description of Artificial Sequence: Synthetic oligonucleotide
  misc_feature 1..20: note = Target: ANGPTL4; (-) strand; PAM type: YTN; PAM sequence: CTG
  source 1..20: mol_type = other DNA
tcacccaggctggagtgcag

SEQ ID NO: 15595 - DNA, 20 bp, synthetic construct
  misc_feature 1..20: note = Description of Artificial Sequence: Synthetic oligonucleotide
  misc_feature 1..20: note = Target: ANGPTL4; (-) strand; PAM type: YTN; PAM sequence: CTC
  source 1..20: mol_type = other DNA
tgtcacccaggctggagtgc

SEQ ID NO: 15596 - DNA, 20 bp, synthetic construct
  misc_feature 1..20: note = Description of Artificial Sequence: Synthetic oligonucleotide
  misc_feature 1..20: note = Target: ANGPTL4; (-) strand; PAM type: YTN; PAM sequence: TTG
  source 1..20: mol_type = other DNA
ctctgtcacccaggctggag

SEQ ID NO: 15597 - DNA, 20 bp, synthetic construct
  misc_feature 1..20: note = Description of Artificial Sequence: Synthetic oligonucleotide
  misc_feature 1..20: note = Target: ANGPTL4; (-) strand; PAM type: YTN; PAM sequence: CTT
  source 1..20: mol_type = other DNA
gctctgtcacccaggctgga

SEQ ID NO: 15598 - DNA, 20 bp, synthetic construct
  misc_feature 1..20: note = Description of Artificial Sequence: Synthetic oligonucleotide
  misc_feature 1..20: note = Target: ANGPTL4; (-) strand; PAM type: YTN; PAM sequence: TTG
  source 1..20: mol_type = other DNA
aaatcaagtcttgctctgtc

SEQ ID NO: 15599 - DNA, 20 bp, synthetic construct
  misc_feature 1..20: note = Description of Artificial Sequence: Synthetic oligonucleotide
  misc_feature 1..20: note = Target: ANGPTL4; (-) strand; PAM type: YTN; PAM sequence: TTT
  source 1..20: mol_type = other DNA
gaaatcaagtcttgctctgt

SEQ ID NO: 15600 - DNA, 20 bp, synthetic construct
  misc_feature 1..20: note = Description of Artificial Sequence: Synthetic oligonucleotide
  misc_feature 1..20: note = Target: ANGPTL4; (-) strand; PAM type: YTN; PAM sequence: TTT
  source 1..20: mol_type = other DNA
tgaaatcaagtcttgctctg

SEQ ID NO: 15601 - DNA, 20 bp, synthetic construct
  misc_feature 1..20: note = Description of Artificial Sequence: Synthetic oligonucleotide
  misc_feature 1..20: note = Target: ANGPTL4; (-) strand; PAM type: YTN; PAM sequence: TTT
  source 1..20: mol_type = other DNA
ttgaaatcaagtcttgctct

SEQ ID NO: 15602 - DNA, 20 bp, synthetic construct
  misc_feature 1..20: note = Description of Artificial Sequence: Synthetic oligonucleotide
  misc_feature 1..20: note = Target: ANGPTL4; (-) strand; PAM type: YTN; PAM sequence: TTT
  source 1..20: mol_type = other DNA
tttgaaatcaagtcttgctc

SEQ ID NO: 15603 - DNA, 20 bp, synthetic construct
  misc_feature 1..20: note = Description of Artificial Sequence: Synthetic oligonucleotide
  misc_feature 1..20: note = Target: ANGPTL4; (-) strand; PAM type: YTN; PAM sequence: TTT
  source 1..20: mol_type = other DNA
ttttgaaatcaagtcttgct

SEQ ID NO: 15604 - DNA, 20 bp, synthetic construct
  misc_feature 1..20: note = Description of Artificial Sequence: Synthetic oligonucleotide
  misc_feature 1..20: note = Target: ANGPTL4; (-) strand; PAM type: YTN; PAM sequence: TTT
  source 1..20: mol_type = other DNA
tttttgaaatcaagtcttgc

SEQ ID NO: 15605 - DNA, 20 bp, synthetic construct
  misc_feature 1..20: note = Description of Artificial Sequence: Synthetic oligonucleotide
  misc_feature 1..20: note = Target: ANGPTL4; (-) strand; PAM type: YTN; PAM sequence: TTT
  source 1..20: mol_type = other DNA
ttttttgaaatcaagtcttg

SEQ ID NO: 15606 - DNA, 20 bp, synthetic construct
  misc_feature 1..20: note = Description of Artificial Sequence: Synthetic oligonucleotide
  misc_feature 1..20: note = Target: ANGPTL4; (-) strand; PAM type: YTN; PAM sequence: TTT
  source 1..20: mol_type = other DNA
tttttttgaaatcaagtctt

SEQ ID NO: 15607 - DNA, 20 bp, synthetic construct
  misc_feature 1..20: note = Description of Artificial Sequence: Synthetic oligonucleotide
  misc_feature 1..20: note = Target: ANGPTL4; (-) strand; PAM type: YTN; PAM sequence: TTT
  source 1..20: mol_type = other DNA
ttttttttgaaatcaagtct

SEQ ID NO: 15608 - DNA, 20 bp, synthetic construct
  misc_feature 1..20: note = Description of Artificial Sequence: Synthetic oligonucleotide
  misc_feature 1..20: note = Target: ANGPTL4; (-) strand; PAM type: YTN; PAM sequence: TTT
  source 1..20: mol_type = other DNA
tttttttttgaaatcaagtc

SEQ ID NO: 15609 - DNA, 20 bp, synthetic construct
  misc_feature 1..20: note = Description of Artificial Sequence: Synthetic oligonucleotide
  misc_feature 1..20: note = Target: ANGPTL4; (-) strand; PAM type: YTN; PAM sequence: TTT
  source 1..20: mol_type = other DNA
ttttttttttgaaatcaagt

SEQ ID NO: 15610 - DNA, 20 bp, synthetic construct
  misc_feature 1..20: note = Description of Artificial Sequence: Synthetic oligonucleotide
  misc_feature 1..20: note = Target: ANGPTL4; (-) strand; PAM type: YTN; PAM sequence: TTT
  source 1..20: mol_type = other DNA
tttttttttttgaaatcaag

SEQ ID NO: 15611 - DNA, 20 bp, synthetic construct
  misc_feature 1..20: note = Description of Artificial Sequence: Synthetic oligonucleotide
  misc_feature 1..20: note = Target: ANGPTL4; (-) strand; PAM type: YTN; PAM sequence: TTT
  source 1..20: mol_type = other DNA
ttttttttttttgaaatcaa

SEQ ID NO: 15612 - DNA, 20 bp, synthetic construct
  misc_feature 1..20: note = Description of Artificial Sequence: Synthetic oligonucleotide
  misc_feature 1..20: note = Target: ANGPTL4; (-) strand; PAM type: YTN; PAM sequence: TTT
  source 1..20: mol_type = other DNA
tttttttttttttgaaatca

SEQ ID NO: 15613 - DNA, 20 bp, synthetic construct
  misc_feature 1..20: note = Description of Artificial Sequence: Synthetic oligonucleotide
  misc_feature 1..20: note = Target: ANGPTL4; (-) strand; PAM type: YTN; PAM sequence: TTT
  source 1..20: mol_type = other DNA
ttttttttttttttgaaatc

SEQ ID NO: 15614 - DNA, 20 bp, synthetic construct
  misc_feature 1..20: note = Description of Artificial Sequence: Synthetic oligonucleotide
  misc_feature 1..20: note = Target: ANGPTL4; (-) strand; PAM type: YTN; PAM sequence: TTT
  source 1..20: mol_type = other DNA
tttttttttttttttgaaat

SEQ ID NO: 15615 - DNA, 20 bp, synthetic construct
  misc_feature 1..20: note = Description of Artificial Sequence: Synthetic oligonucleotide
  misc_feature 1..20: note = Target: ANGPTL4; (-) strand; PAM type: YTN; PAM sequence: TTT
  source 1..20: mol_type = other DNA
ttttttttttttttttgaaa

SEQ ID NO: 15616 - DNA, 20 bp, synthetic construct
  misc_feature 1..20: note = Description of Artificial Sequence: Synthetic oligonucleotide
  misc_feature 1..20: note = Target: ANGPTL4; (-) strand; PAM type: YTN; PAM sequence: TTT
  source 1..20: mol_type = other DNA
tttttttttttttttttgaa

SEQ ID NO: 15617 - DNA, 20 bp, synthetic construct
  misc_feature 1..20: note = Description of Artificial Sequence: Synthetic oligonucleotide
  misc_feature 1..20: note = Target: ANGPTL4; (-) strand; PAM type: YTN; PAM sequence: TTT
  source 1..20: mol_type = other DNA
ttttttttttttttttttga

SEQ ID NO: 15618 - DNA, 20 bp, synthetic construct
  misc_feature 1..20: note = Description of Artificial Sequence: Synthetic oligonucleotide
  misc_feature 1..20: note = Target: ANGPTL4; (-) strand; PAM type: YTN; PAM sequence: TTT
  source 1..20: mol_type = other DNA
tttttttttttttttttttg

SEQ ID NO: 15619 - DNA, 20 bp, synthetic construct
  misc_feature 1..20: note = Description of Artificial Sequence: Synthetic oligonucleotide
  misc_feature 1..20: note = Target: ANGPTL4; (-) strand; PAM type: YTN; PAM sequence: TTT
  source 1..20: mol_type = other DNA
tttttttttttttttttttt

SEQ ID NO: 15620 - DNA, 20 bp, synthetic construct
  misc_feature 1..20: note = Description of Artificial Sequence: Synthetic oligonucleotide
  misc_feature 1..20: note = Target: ANGPTL4; (-) strand; PAM type: YTN; PAM sequence: CTT
  source 1..20: mol_type = other DNA
tttttttttttttttttttt

SEQ ID NO: 15621 - DNA, 20 bp, synthetic construct
  misc_feature 1..20: note = Description of Artificial Sequence: Synthetic oligonucleotide
  misc_feature 1..20: note = Target: ANGPTL4; (-) strand; PAM type: YTN; PAM sequence: TTC
  source 1..20: mol_type = other DNA
tttttttttttttttttttt

SEQ ID NO: 15622 - DNA, 20 bp, synthetic construct
  misc_feature 1..20: note = Description of Artificial Sequence: Synthetic oligonucleotide
  misc_feature 1..20: note = Target: ANGPTL4; (-) strand; PAM type: YTN; PAM sequence: CTA
  source 1..20: mol_type = other DNA
ttcttttttttttttttttt

SEQ ID NO: 15623 - DNA, 20 bp, synthetic construct
  misc_feature 1..20: note = Description of Artificial Sequence: Synthetic oligonucleotide
  misc_feature 1..20: note = Target: ANGPTL4; (-) strand; PAM type: YTN; PAM sequence: TTA
  source 1..20: mol_type = other DNA
caagtgtgagccaatgcgcc

SEQ ID NO: 15624 - DNA, 20 bp, synthetic construct
  misc_feature 1..20: note = Description of Artificial Sequence: Synthetic oligonucleotide
  misc_feature 1..20: note = Target: ANGPTL4; (-) strand; PAM type: YTN; PAM sequence: CTA
  source 1..20: mol_type = other DNA
gtgttacaagtgtgagccaa

SEQ ID NO: 15625 - DNA, 20 bp, synthetic construct
  misc_feature 1..20: note = Description of Artificial Sequence: Synthetic oligonucleotide
  misc_feature 1..20: note = Target: ANGPTL4; (-) strand; PAM type: YTN; PAM sequence: CTC
  source 1..20: mol_type = other DNA
ccaaagtgctagtgttacaa

SEQ ID NO: 15626 - DNA, 20 bp, synthetic construct
  misc_feature 1..20: note = Description of Artificial Sequence: Synthetic oligonucleotide
  misc_feature 1..20: note = Target: ANGPTL4; (-) strand; PAM type: YTN; PAM sequence: TTG
  source 1..20: mol_type = other DNA
gcctcccaaagtgctagtgt

SEQ ID NO: 15627 - DNA, 20 bp, synthetic construct
  misc_feature 1..20: note = Description of Artificial Sequence: Synthetic oligonucleotide
  misc_feature 1..20: note = Target: ANGPTL4; (-) strand; PAM type: YTN; PAM sequence: CTC
  source 1..20: mol_type = other DNA
gttggcctcccaaagtgcta

SEQ ID NO: 15628 - DNA, 20 bp, synthetic construct
  misc_feature 1..20: note = Description of Artificial Sequence: Synthetic oligonucleotide
  misc_feature 1..20: note = Target: ANGPTL4; (-) strand; PAM type: YTN; PAM sequence: CTC
  source 1..20: mol_type = other DNA
gggtgatccgctcgttggcc

SEQ ID NO: 15629 - DNA, 20 bp, synthetic construct
  misc_feature 1..20: note = Description of Artificial Sequence: Synthetic oligonucleotide
  misc_feature 1..20: note = Target: ANGPTL4; (-) strand; PAM type: YTN; PAM sequence: CTA
  source 1..20: mol_type = other DNA
tatagagcaatacagcggga

SEQ ID NO: 15630 - DNA, 20 bp, synthetic construct
  misc_feature 1..20: note = Description of Artificial Sequence: Synthetic oligonucleotide
  misc_feature 1..20: note = Target: ANGPTL4; (-) strand; PAM type: YTN; PAM sequence: CTC
  source 1..20: mol_type = other DNA
actatatagagcaatacagc

SEQ ID NO: 15631 - DNA, 20 bp, synthetic construct
  misc_feature 1..20: note = Description of Artificial Sequence: Synthetic oligonucleotide
  misc_feature 1..20: note = Target: ANGPTL4; (-) strand; PAM type: YTN; PAM sequence: CTA
  source 1..20: mol_type = other DNA
tatagggatctcactatata

SEQ ID NO: 15632 - DNA, 20 bp, synthetic construct
  misc_feature 1..20: note = Description of Artificial Sequence: Synthetic oligonucleotide
  misc_feature 1..20: note = Target: ANGPTL4; (-) strand; PAM type: YTN; PAM sequence: CTG
  source 1..20: mol_type = other DNA
gacaatagagtgagacccta

SEQ ID NO: 15633 - DNA, 20 bp, synthetic construct
  misc_feature 1..20: note = Description of Artificial Sequence: Synthetic oligonucleotide
  misc_feature 1..20: note = Target: ANGPTL4; (-) strand; PAM type: YTN; PAM sequence: TTG
  source 1..20: mol_type = other DNA
gccaggccagaccagcctgg

SEQ ID NO: 15634 - DNA, 20 bp, synthetic construct
  misc_feature 1..20: note = Description of Artificial Sequence: Synthetic oligonucleotide
  misc_feature 1..20: note = Target: ANGPTL4; (-) strand; PAM type: YTN; PAM sequence: TTC
  source 1..20: mol_type = other DNA
accacattggccaggccaga

SEQ ID NO: 15635 - DNA, 20 bp, synthetic construct
  misc_feature 1..20: note = Description of Artificial Sequence: Synthetic oligonucleotide
  misc_feature 1..20: note = Target: ANGPTL4; (-) strand; PAM type: YTN; PAM sequence: TTT
  source 1..20: mol_type = other DNA
caccacattggccaggccag

SEQ ID NO: 15636 - DNA, 20 bp, synthetic construct
  misc_feature 1..20: note = Description of Artificial Sequence: Synthetic oligonucleotide
  misc_feature 1..20: note = Target: ANGPTL4; (-) strand; PAM type: YTN; PAM sequence: TTA
  source 1..20: mol_type = other DNA
gtagaaatgaggtttcacca

SEQ ID NO: 15637 - DNA, 20 bp, synthetic construct
  misc_feature 1..20: note = Description of Artificial Sequence: Synthetic oligonucleotide
  misc_feature 1..20: note = Target: ANGPTL4; (-) strand; PAM type: YTN; PAM sequence: TTT
  source 1..20: mol_type = other DNA
agtagaaatgaggtttcacc

SEQ ID NO: 15638 - DNA, 20 bp, synthetic construct
  misc_feature 1..20: note = Description of Artificial Sequence: Synthetic oligonucleotide
  misc_feature 1..20: note = Target: ANGPTL4; (-) strand; PAM type: YTN; PAM sequence: TTT
  source 1..20: mol_type = other DNA
tagtagaaatgaggtttcac

SEQ ID NO: 15639 - DNA, 20 bp, synthetic construct
  misc_feature 1..20: note = Description of Artificial Sequence: Synthetic oligonucleotide
  misc_feature 1..20: note = Target: ANGPTL4; (-) strand; PAM type: YTN; PAM sequence: TTT
  source 1..20: mol_type = other DNA
ttagtagaaatgaggtttca

SEQ ID NO: 15640 - DNA, 20 bp, synthetic construct
  misc_feature 1..20: note = Description of Artificial Sequence: Synthetic oligonucleotide
  misc_feature 1..20: note = Target: ANGPTL4; (-) strand; PAM type: YTN; PAM sequence: TTG
  source 1..20: mol_type = other DNA
tatttttagtagaaatgagg

SEQ ID NO: 15641 - DNA, 20 bp, synthetic construct
  misc_feature 1..20: note = Description of Artificial Sequence: Synthetic oligonucleotide
  misc_feature 1..20: note = Target: ANGPTL4; (-) strand; PAM type: YTN; PAM sequence: TTT
  source 1..20: mol_type = other DNA
gtatttttagtagaaatgag

SEQ ID NO: 15642 - DNA, 20 bp, synthetic construct
  misc_feature 1..20: note = Description of Artificial Sequence: Synthetic oligonucleotide
  misc_feature 1..20: note = Target: ANGPTL4; (-) strand; PAM type: YTN; PAM sequence: TTT
  source 1..20: mol_type = other DNA
tgtatttttagtagaaatga

SEQ ID NO: 15643 - DNA, 20 bp, synthetic construct
  misc_feature 1..20: note = Description of Artificial Sequence: Synthetic oligonucleotide
  misc_feature 1..20: note = Target: ANGPTL4; (-) strand; PAM type: YTN; PAM sequence: TTT
  source 1..20: mol_type = other DNA
ttgtatttttagtagaaatg

SEQ ID NO: 15644 - DNA, 20 bp, synthetic construct
  misc_feature 1..20: note = Description of Artificial Sequence: Synthetic oligonucleotide
  misc_feature 1..20: note = Target: ANGPTL4; (-) strand; PAM type: YTN; PAM sequence: CTA
  source 1..20: mol_type = other DNA
atttttgtatttttagtaga

SEQ ID NO: 15645 - DNA, 20 bp, synthetic construct
  misc_feature 1..20: note = Description of Artificial Sequence: Synthetic oligonucleotide
  misc_feature 1..20: note = Target: ANGPTL4; (-) strand; PAM type: YTN; PAM sequence: CTA
  source 1..20: mol_type = other DNA
tgcccagctaatttttgtat

SEQ ID NO: 15646 - DNA, 20 bp, synthetic construct
  misc_feature 1..20: note = Description of Artificial Sequence: Synthetic oligonucleotide
  misc_feature 1..20: note = Target: ANGPTL4; (-) strand; PAM type: YTN; PAM sequence: TTA
  source 1..20: mol_type = other DNA
taggtgcgcatcactatgcc

SEQ ID NO: 15647 - DNA, 20 bp, synthetic construct
  misc_feature 1..20: note = Description of Artificial Sequence: Synthetic oligonucleotide
  misc_feature 1..20: note = Target: ANGPTL4; (-) strand; PAM type: YTN; PAM sequence: CTG
  source 1..20: mol_type = other DNA
ggattataggtgcgcatcac

SEQ ID NO: 15648 - DNA, 20 bp, synthetic construct
  misc_feature 1..20: note = Description of Artificial Sequence: Synthetic oligonucleotide
  misc_feature 1..20: note = Target: ANGPTL4; (-) strand; PAM type: YTN; PAM sequence: CTG
  source 1..20: mol_type = other DNA
agtagctgggattataggtg

SEQ ID NO: 15649 - DNA, 20 bp, synthetic construct
  misc_feature 1..20: note = Description of Artificial Sequence: Synthetic oligonucleotide
  misc_feature 1..20: note = Target: ANGPTL4; (-) strand; PAM type: YTN; PAM sequence: CTC
  source 1..20: mol_type = other DNA
ctgagtagctgggattatag

SEQ ID NO: 15650 - DNA, 20 bp, synthetic construct
  misc_feature 1..20: note = Description of Artificial Sequence: Synthetic oligonucleotide
  misc_feature 1..20: note = Target: ANGPTL4; (-) strand; PAM type: YTN; PAM sequence: CTC
  source 1..20: mol_type = other DNA
agcctcctgagtagctggga

SEQ ID NO: 15651 - DNA, 20 bp, synthetic construct
  misc_feature 1..20: note = Description of Artificial Sequence: Synthetic oligonucleotide
  misc_feature 1..20: note = Target: ANGPTL4; (-) strand; PAM type: YTN; PAM sequence: CTC
  source 1..20: mol_type = other DNA
cggcctcagcctcctgagta

SEQ ID NO: 15652 - DNA, 20 bp, synthetic construct
  misc_feature 1..20: note = Description of Artificial Sequence: Synthetic oligonucleotide
  misc_feature 1..20: note = Target: ANGPTL4; (-) strand; PAM type: YTN; PAM sequence: TTC
  source 1..20: mol_type = other DNA
tccggcctcagcctcctgag

SEQ ID NO: 15653 - DNA, 20 bp, synthetic construct
  misc_feature 1..20: note = Description of Artificial Sequence: Synthetic oligonucleotide
  misc_feature 1..20: note = Target: ANGPTL4; (-) strand; PAM type: YTN; PAM sequence: TTC
  source 1..20: mol_type = other DNA
aagcaattctccggcctcag

SEQ ID NO: 15654 - DNA, 20 bp, synthetic construct
  misc_feature 1..20: note = Description of Artificial Sequence: Synthetic oligonucleotide
  misc_feature 1..20: note = Target: ANGPTL4; (-) strand; PAM type: YTN; PAM sequence: CTG
  source 1..20: mol_type = other DNA
ggttcaagcaattctccggc

SEQ ID NO: 15655 - DNA, 20 bp, synthetic construct
  misc_feature 1..20: note = Description of Artificial Sequence: Synthetic oligonucleotide
  misc_feature 1..20: note = Target: ANGPTL4; (-) strand; PAM type: YTN; PAM sequence: CTC
  source 1..20: mol_type = other DNA
ctgggttcaagcaattctcc

SEQ ID NO: 15656 - DNA, 20 bp, synthetic construct
  misc_feature 1..20: note = Description of Artificial Sequence: Synthetic oligonucleotide
  misc_feature 1..20: note = Target: ANGPTL4; (-) strand; PAM type: YTN; PAM sequence: CTC
  source 1..20: mol_type = other DNA
cacctcctgggttcaagcaa

SEQ ID NO: 15657 - DNA, 20 bp, synthetic construct
  misc_feature 1..20: note = Description of Artificial Sequence: Synthetic oligonucleotide
  misc_feature 1..20: note = Target: ANGPTL4; (-) strand; PAM type: YTN; PAM sequence: CTG
  source 1..20: mol_type = other DNA
caacctccacctcctgggtt

SEQ ID NO: 15658 - DNA, 20 bp, synthetic construct
  misc_feature 1..20: note = Description of Artificial Sequence: Synthetic oligonucleotide
  misc_feature 1..20: note = Target: ANGPTL4; (-) strand; PAM type: YTN; PAM sequence: CTC
  source 1..20: mol_type = other DNA
actgcaacctccacctcctg

SEQ ID NO: 15659 - DNA, 20 bp, synthetic construct
  misc_feature 1..20: note = Description of Artificial Sequence: Synthetic oligonucleotide
  misc_feature 1..20: note = Target: ANGPTL4; (-) strand; PAM type: YTN; PAM sequence: CTC
  source 1..20: mol_type = other DNA
ggctcactgcaacctccacc

SEQ ID NO: 15660 - DNA, 20 bp, synthetic construct
  misc_feature 1..20: note = Description of Artificial Sequence: Synthetic oligonucleotide
  misc_feature 1..20: note = Target: ANGPTL4; (-) strand; PAM type: YTN; PAM sequence: CTC
  source 1..20: mol_type = other DNA
agcgccatctcggctcactg

SEQ ID NO: 15661 - DNA, 20 bp, synthetic construct
  misc_feature 1..20: note = Description of Artificial Sequence: Synthetic oligonucleotide
  misc_feature 1..20: note = Target: ANGPTL4; (-) strand; PAM type: YTN; PAM sequence: CTC
  source 1..20: mol_type = other DNA
tcagcgccatctcggctcac

SEQ ID NO: 15662 - DNA, 20 bp, synthetic construct
  misc_feature 1..20: note = Description of Artificial Sequence: Synthetic oligonucleotide
  misc_feature 1..20: note = Target: ANGPTL4; (-) strand; PAM type: YTN; PAM sequence: CTG
  source 1..20: mol_type = other DNA
tcacctctcagcgccatctc

SEQ ID NO: 15663 - DNA, 20 bp, synthetic construct
  misc_feature 1..20: note = Description of Artificial Sequence: Synthetic oligonucleotide
  misc_feature 1..20: note = Target: ANGPTL4; (-) strand; PAM type: YTN; PAM sequence: CTG
  source 1..20: mol_type = other DNA
ccagcacgctgtcacctctc

SEQ ID NO: 15664 - DNA, 20 bp, synthetic construct
  misc_feature 1..20: note = Description of Artificial Sequence: Synthetic oligonucleotide
  misc_feature 1..20: note = Target: ANGPTL4; (-) strand; PAM type: YTN; PAM sequence: CTG
  source 1..20: mol_type = other DNA
tgaggactgccagcacgctg

SEQ ID NO: 15665 - DNA, 20 bp, synthetic construct
  misc_feature 1..20: note = Description of Artificial Sequence: Synthetic oligonucleotide
  misc_feature 1..20: note = Target: ANGPTL4; (-) strand; PAM type: YTN; PAM sequence: CTG
  source 1..20: mol_type = other DNA
aagtgccgccacagtgggag

SEQ ID NO: 15666 - DNA, 20 bp, synthetic construct
  misc_feature 1..20: note = Description of Artificial Sequence: Synthetic oligonucleotide
  misc_feature 1..20: note = Target: ANGPTL4; (-) strand; PAM type: YTN; PAM sequence: CTC
  source 1..20: mol_type = other DNA
ctgaagtgccgccacagtgg

SEQ ID NO: 15667 - DNA, 20 bp, synthetic construct
  misc_feature 1..20: note = Description of Artificial Sequence: Synthetic oligonucleotide
  misc_feature 1..20: note = Target: ANGPTL4; (-) strand; PAM type: YTN; PAM sequence: CTG
  source 1..20: mol_type = other DNA
aagggctcctgaagtgccgc

SEQ ID NO: 15668 - DNA, 20 bp, synthetic construct
  misc_feature 1..20: note = Description of Artificial Sequence: Synthetic oligonucleotide
  misc_feature 1..20: note = Target: ANGPTL4; (-) strand; PAM type: YTN; PAM sequence: CTC
  source 1..20: mol_type = other DNA
ccacagtgcagcggtgggct

SEQ ID NO: 15669 - DNA, 20 bp, synthetic construct
  misc_feature 1..20: note = Description of Artificial Sequence: Synthetic oligonucleotide
  misc_feature 1..20: note = Target: ANGPTL4; (-) strand; PAM type: YTN; PAM sequence: TTG
  source 1..20: mol_type = other DNA
gccagcccagaaaggggctc

SEQ ID NO: 15670 - DNA, 20 bp, synthetic construct
  misc_feature 1..20: note = Description of Artificial Sequence: Synthetic oligonucleotide
  misc_feature 1..20: note = Target: ANGPTL4; (-) strand; PAM type: YTN; PAM sequence: CTT
  source 1..20: mol_type = other DNA
ggccagcccagaaaggggct

SEQ ID NO: 15671 - DNA, 20 bp, synthetic construct
  misc_feature 1..20: note = Description of Artificial Sequence: Synthetic oligonucleotide
  misc_feature 1..20: note = Target: ANGPTL4; (-) strand; PAM type: YTN; PAM sequence: CTC
  source 1..20: mol_type = other DNA
cggccttggccagcccagaa

SEQ ID NO: 15672 - DNA, 20 bp, synthetic construct
  misc_feature 1..20: note = Description of Artificial Sequence: Synthetic oligonucleotide
  misc_feature 1..20: note = Target: ANGPTL4; (-) strand; PAM type: YTN; PAM sequence: CTG
  source 1..20: mol_type = other DNA
agggagccagctccggcctt

SEQ ID NO: 15673 - DNA, 20 bp, synthetic construct
  misc_feature 1..20: note = Description of Artificial Sequence: Synthetic oligonucleotide
  misc_feature 1..20: note = Target: ANGPTL4; (-) strand; PAM type: YTN; PAM sequence: CTG
  source 1..20: mol_type = other DNA
caagctgagggagccagctc

SEQ ID NO: 15674 - DNA, 20 bp, synthetic construct
  misc_feature 1..20: note = Description of Artificial Sequence: Synthetic oligonucleotide
  misc_feature 1..20: note = Target: ANGPTL4; (-) strand; PAM type: YTN; PAM sequence: TTC
  source 1..20: mol_type = other DNA
cctgcaagctgagggagcca

SEQ ID NO: 15675 - DNA, 20 bp, synthetic construct
  misc_feature 1..20: note = Description of Artificial Sequence: Synthetic oligonucleotide
  misc_feature 1..20: note = Target: ANGPTL4; (-) strand; PAM type: YTN; PAM sequence: CTT
  source 1..20: mol_type = other DNA
ccctgcaagctgagggagcc

SEQ ID NO: 15676 - DNA, 20 bp, synthetic construct
  misc_feature 1..20: note = Description of Artificial Sequence: Synthetic oligonucleotide
  misc_feature 1..20: note = Target: ANGPTL4; (-) strand; PAM type: YTN; PAM sequence: CTC
  source 1..20: mol_type = other DNA
cacacttccctgcaagctga

SEQ ID NO: 15677 - DNA, 20 bp, synthetic construct
  misc_feature 1..20: note = Description of Artificial Sequence: Synthetic oligonucleotide
  misc_feature 1..20: note = Target: ANGPTL4; (-) strand; PAM type: YTN; PAM sequence: CTC
  source 1..20: mol_type = other DNA
cctccacacttccctgcaag

SEQ ID NO: 15678 - DNA, 20 bp, synthetic construct
  misc_feature 1..20: note = Description of Artificial Sequence: Synthetic oligonucleotide
  misc_feature 1..20: note = Target: ANGPTL4; (-) strand; PAM type: YTN; PAM sequence: CTC
  source 1..20: mol_type = other DNA
tccctccacacttccctgca

SEQ ID NO: 15679 - DNA, 20 bp, synthetic construct
  misc_feature 1..20: note = Description of Artificial Sequence: Synthetic oligonucleotide
  misc_feature 1..20: note = Target: ANGPTL4; (-) strand; PAM type: YTN; PAM sequence: CTC
  source 1..20: mol_type = other DNA
gcgcctctccctccacactt

SEQ ID NO: 15680 - DNA, 20 bp, synthetic construct
  misc_feature 1..20: note = Description of Artificial Sequence: Synthetic oligonucleotide
  misc_feature 1..20: note = Target: ANGPTL4; (-) strand; PAM type: YTN; PAM sequence: TTC
  source 1..20: mol_type = other DNA
cggctcgcgcctctccctcc

SEQ ID NO: 15681 - DNA, 20 bp, synthetic construct
  misc_feature 1..20: note = Description of Artificial Sequence: Synthetic oligonucleotide
  misc_feature 1..20: note = Target: ANGPTL4; (-) strand; PAM type: YTN; PAM sequence: CTG
  source 1..20: mol_type = other DNA
gcccacaagcaccgcgcgca

SEQ ID NO: 15682 - DNA, 20 bp, synthetic construct
  misc_feature 1..20: note = Description of Artificial Sequence: Synthetic oligonucleotide
  misc_feature 1..20: note = Target: ANGPTL4; (-) strand; PAM type: YTN; PAM sequence: CTC
  source 1..20: mol_type = other DNA
cagctggcccacaagcaccg

SEQ ID NO: 15683 - DNA, 20 bp, synthetic construct
  misc_feature 1..20: note = Description of Artificial Sequence: Synthetic oligonucleotide
  misc_feature 1..20: note = Target: ANGPTL4; (-) strand; PAM type: YTN; PAM sequence: CTG
  source 1..20: mol_type = other DNA
agtgcagggtccgccaagcc

SEQ ID NO: 15684 - DNA, 20 bp, synthetic construct
  misc_feature 1..20: note = Description of Artificial Sequence: Synthetic oligonucleotide
  misc_feature 1..20: note = Target: ANGPTL4; (-) strand; PAM type: YTN; PAM sequence: CTC
  source 1..20: mol_type = other DNA
tgagtgcagggtccgccaag

SEQ ID NO: 15685 - DNA, 20 bp, synthetic construct
  misc_feature 1..20: note = Description of Artificial Sequence: Synthetic oligonucleotide
  misc_feature 1..20: note = Target: ANGPTL4; (-) strand; PAM type: YTN; PAM sequence: CTG
  source 1..20: mol_type = other DNA
ctctgagtgcagggtccgcc

SEQ ID NO: 15686 - DNA, 20 bp, synthetic construct
  misc_feature 1..20: note = Description of Artificial Sequence: Synthetic oligonucleotide
  misc_feature 1..20: note = Target: ANGPTL4; (-) strand; PAM type: YTN; PAM sequence: TTG
  source 1..20: mol_type = other DNA
cccggggccagcagggccgg

SEQ ID NO: 15687 - DNA, 20 bp, synthetic construct
  misc_feature 1..20: note = Description of Artificial Sequence: Synthetic oligonucleotide
  misc_feature 1..20: note = Target: ANGPTL4; (-) strand; PAM type: YTN; PAM sequence: CTC
  source 1..20: mol_type = other DNA
attgcccggggccagcaggg

SEQ ID NO: 15688 - DNA, 20 bp, synthetic construct
  misc_feature 1..20: note = Description of Artificial Sequence: Synthetic oligonucleotide
  misc_feature 1..20: note = Target: ANGPTL4; (-) strand; PAM type: YTN; PAM sequence: CTA
  source 1..20: mol_type = other DNA
agcccctcattgcccggggc

SEQ ID NO: 15689 - DNA, 20 bp, synthetic construct
  misc_feature 1..20: note = Description of Artificial Sequence: Synthetic oligonucleotide
  misc_feature 1..20: note = Target: ANGPTL4; (-) strand; PAM type: YTN; PAM sequence: CTG
  source 1..20: mol_type = other DNA
tccggcccgggtgctaagcc

SEQ ID NO: 15690 - DNA, 20 bp, synthetic construct
  misc_feature 1..20: note = Description of Artificial Sequence: Synthetic oligonucleotide
  misc_feature 1..20: note = Target: ANGPTL4; (-) strand; PAM type: YTN; PAM sequence: CTC
  source 1..20: mol_type = other DNA
cgcagccgctgtccggcccg

SEQ ID NO: 15691 - DNA, 20 bp, synthetic construct
  misc_feature 1..20: note = Description of Artificial Sequence: Synthetic oligonucleotide
  misc_feature 1..20: note = Target: ANGPTL4; (-) strand; PAM type: YTN; PAM sequence: CTG
  source 1..20: mol_type = other DNA
ggggacccagtacaccctcc

SEQ ID NO: 15692 - DNA, 20 bp, synthetic construct
  misc_feature 1..20: note = Description of Artificial Sequence: Synthetic oligonucleotide
  misc_feature 1..20: note = Target: ANGPTL4; (-) strand; PAM type: YTN; PAM sequence: CTG
  source 1..20: mol_type = other DNA
ctgggggacccagtacaccc

SEQ ID NO: 15693 - DNA, 20 bp, synthetic construct
  misc_feature 1..20: note = Description of Artificial Sequence: Synthetic oligonucleotide
  misc_feature 1..20: note = Target: ANGPTL4; (-) strand; PAM type: YTN; PAM sequence: CTG
  source 1..20: mol_type = other DNA
gcactgctgggggacccagt

SEQ ID NO: 15694 - DNA, 20 bp, synthetic construct
  misc_feature 1..20: note = Description of Artificial Sequence: Synthetic oligonucleotide
  misc_feature 1..20: note = Target: ANGPTL4; (-) strand; PAM type: YTN; PAM sequence: CTG
  source 1..20: mol_type = other DNA
gtgagaaatcaagcgcagcg

SEQ ID NO: 15695 - DNA, 20 bp, synthetic construct
  misc_feature 1..20: note = Description of Artificial Sequence: Synthetic oligonucleotide
  misc_feature 1..20: note = Target: ANGPTL4; (-) strand; PAM type: YTN; PAM sequence: CTA
  source 1..20: mol_type = other DNA
aggcctggtgagaaatcaag

SEQ ID NO: 15696 - DNA, 20 bp, synthetic construct
  misc_feature 1..20: note = Description of Artificial Sequence: Synthetic oligonucleotide
  misc_feature 1..20: note = Target: ANGPTL4; (-) strand; PAM type: YTN; PAM sequence: CTG
  source 1..20: mol_type = other DNA
ccccgcgggaaggcagctaa

SEQ ID NO: 15697 - DNA, 20 bp, synthetic construct
  misc_feature 1..20: note = Description of Artificial Sequence: Synthetic oligonucleotide
  misc_feature 1..20: note = Target: ANGPTL4; (-) strand; PAM type: YTN; PAM sequence: CTG
  source 1..20: mol_type = other DNA
caggtcccgatccctgcccc

SEQ ID NO: 15698 - DNA, 20 bp, synthetic construct
  misc_feature 1..20: note = Description of Artificial Sequence: Synthetic oligonucleotide
  misc_feature 1..20: note = Target: ANGPTL4; (-) strand; PAM type: YTN; PAM sequence: CTC
  source 1..20: mol_type = other DNA
aggcatggcgggctgcaggt

SEQ ID NO: 15699 - DNA, 20 bp, synthetic construct
  misc_feature 1..20: note = Description of Artificial Sequence: Synthetic oligonucleotide
  misc_feature 1..20: note = Target: ANGPTL4; (-) strand; PAM type: YTN; PAM sequence: CTC
  source 1..20: mol_type = other DNA
gtcagggaggcgcgggccgc

SEQ ID NO: 15700 - DNA, 20 bp, synthetic construct
  misc_feature 1..20: note = Description of Artificial Sequence: Synthetic oligonucleotide
  misc_feature 1..20: note = Target: ANGPTL4; (-) strand; PAM type: YTN; PAM sequence: CTG
  source 1..20: mol_type = other DNA
ggcaccatggagcatggggc

SEQ ID NO: 15701 - DNA, 20 bp, synthetic construct
  misc_feature 1..20: note = Description of Artificial Sequence: Synthetic oligonucleotide
  misc_feature 1..20: note = Target: ANGPTL4; (-) strand; PAM type: YTN; PAM sequence: TTG
  source 1..20: mol_type = other DNA
ggtggtggatgggactgggc

SEQ ID NO: 15702 - DNA, 20 bp, synthetic construct
  misc_feature 1..20: note = Description of Artificial Sequence: Synthetic oligonucleotide
  misc_feature 1..20: note = Target: ANGPTL4; (-) strand; PAM type: YTN; PAM sequence: CTT
  source 1..20: mol_type = other DNA
gggtggtggatgggactggg

SEQ ID NO: 15703 - DNA, 20 bp, synthetic construct
  misc_feature 1..20: note = Description of Artificial Sequence: Synthetic oligonucleotide
  misc_feature 1..20: note = Target: ANGPTL4; (-) strand; PAM type: YTN; PAM sequence: CTC
  source 1..20: mol_type = other DNA
agcccttgggtggtggatgg

SEQ ID NO: 15704 - DNA, 20 bp, synthetic construct
  misc_feature 1..20: note = Description of Artificial Sequence: Synthetic oligonucleotide
  misc_feature 1..20: note = Target: ANGPTL4; (-) strand; PAM type: YTN; PAM sequence: CTC
  source 1..20: mol_type = other DNA
ctcagcccttgggtggtgga

SEQ ID NO: 15705 - DNA, 20 bp, synthetic construct
  misc_feature 1..20: note = Description of Artificial Sequence: Synthetic oligonucleotide
  misc_feature 1..20: note = Target: ANGPTL4; (-) strand; PAM type: YTN; PAM sequence: CTG
  source 1..20: mol_type = other DNA
cactcctcagcccttgggtg

SEQ ID NO: 15706 - DNA, 20 bp, synthetic construct
  misc_feature 1..20: note = Description of Artificial Sequence: Synthetic oligonucleotide
  misc_feature 1..20: note = Target: ANGPTL4; (-) strand; PAM type: YTN; PAM sequence: CTG
  source 1..20: mol_type = other DNA
ccagtcccacgccgtgcgcc

SEQ ID NO: 15707 - DNA, 20 bp, synthetic construct
  misc_feature 1..20: note = Description of Artificial Sequence: Synthetic oligonucleotide
  misc_feature 1..20: note = Target: ANGPTL4; (-) strand; PAM type: YTN; PAM sequence: CTG
  source 1..20: mol_type = other DNA
cctgccagtcccacgccgtg

SEQ ID NO: 15708 - DNA, 20 bp, synthetic construct
  misc_feature 1..20: note = Description of Artificial Sequence: Synthetic oligonucleotide
  misc_feature 1..20: note = Target: ANGPTL4; (-) strand; PAM type: YTN; PAM sequence: CTG
  source 1..20: mol_type = other DNA
caggtggagctgcctgccag

SEQ ID NO: 15709 - DNA, 20 bp, synthetic construct
  misc_feature 1..20: note = Description of Artificial Sequence: Synthetic oligonucleotide
  misc_feature 1..20: note = Target: ANGPTL4; (-) strand; PAM type: YTN; PAM sequence: CTG
  source 1..20: mol_type = other DNA
caccggggctgcaggtggag

SEQ ID NO: 15710 - DNA, 20 bp, synthetic construct
  misc_feature 1..20: note = Description of Artificial Sequence: Synthetic oligonucleotide
  misc_feature 1..20: note = Target: ANGPTL4; (-) strand; PAM type: YTN; PAM sequence: TTC
  source 1..20: mol_type = other DNA
acccagtggatcctgcaccg

SEQ ID NO: 15711 - DNA, 20 bp, synthetic construct
  misc_feature 1..20: note = Description of Artificial Sequence: Synthetic oligonucleotide
  misc_feature 1..20: note = Target: ANGPTL4; (-) strand; PAM type: YTN; PAM sequence: CTT
  source 1..20: mol_type = other DNA
cacccagtggatcctgcacc

SEQ ID NO: 15712 - DNA, 20 bp, synthetic construct
  misc_feature 1..20: note = Description of Artificial Sequence: Synthetic oligonucleotide
  misc_feature 1..20: note = Target: ANGPTL4; (-) strand; PAM type: YTN; PAM sequence: CTA
  source 1..20: mol_type = other DNA
gcttcacccagtggatcctg

SEQ ID NO: 15713 - DNA, 20 bp, synthetic construct
  misc_feature 1..20: note = Description of Artificial Sequence: Synthetic oligonucleotide
  misc_feature 1..20: note = Target: ANGPTL4; (-) strand; PAM type: YTN; PAM sequence: CTC
  source 1..20: mol_type = other DNA
aggagcccagctagcttcac

SEQ ID NO: 15714 - DNA, 20 bp, synthetic construct
  misc_feature 1..20: note = Description of Artificial Sequence: Synthetic oligonucleotide
  misc_feature 1..20: note = Target: ANGPTL4; (-) strand; PAM type: YTN; PAM sequence: CTC
  source 1..20: mol_type = other DNA
cacgtccccaccagactcag

SEQ ID NO: 15715 - DNA, 20 bp, synthetic construct
  misc_feature 1..20: note = Description of Artificial Sequence: Synthetic oligonucleotide
  misc_feature 1..20: note = Target: ANGPTL4; (-) strand; PAM type: YTN; PAM sequence: TTC
  source 1..20: mol_type = other DNA
tccacgtccccaccagactc

SEQ ID NO: 15716 - DNA, 20 bp, synthetic construct
  misc_feature 1..20: note = Description of Artificial Sequence: Synthetic oligonucleotide
  misc_feature 1..20: note = Target: ANGPTL4; (-) strand; PAM type: YTN; PAM sequence: CTA
  source 1..20: mol_type = other DNA
gacaaaggttctccacgtcc

SEQ ID NO: 15717 - DNA, 20 bp, synthetic construct
  misc_feature 1..20: note = Description of Artificial Sequence: Synthetic oligonucleotide
  misc_feature 1..20: note = Target: ANGPTL4; (-) strand; PAM type: YTN; PAM sequence: CTG
  source 1..20: mol_type = other DNA
agctagacaaaggttctcca

SEQ ID NO: 15718 - DNA, 20 bp, synthetic construct
  misc_feature 1..20: note = Description of Artificial Sequence: Synthetic oligonucleotide
  misc_feature 1..20: note = Target: ANGPTL4; (-) strand; PAM type: YTN; PAM sequence: TTA
  source 1..20: mol_type = other DNA
caatccctgagctagacaaa

SEQ ID NO: 15719 - DNA, 20 bp, synthetic construct
  misc_feature 1..20: note = Description of Artificial Sequence: Synthetic oligonucleotide
  misc_feature 1..20: note = Target: ANGPTL4; (-) strand; PAM type: YTN; PAM sequence: TTT
  source 1..20: mol_type = other DNA
acaatccctgagctagacaa

SEQ ID NO: 15720 - DNA, 20 bp, synthetic construct
  misc_feature 1..20: note = Description of Artificial Sequence: Synthetic oligonucleotide
  misc_feature 1..20: note = Target: ANGPTL4; (-) strand; PAM type: YTN; PAM sequence: TTG
  source 1..20: mol_type = other DNA
gtgtatttacaatccctgag

SEQ ID NO: 15721 - DNA, 20 bp, synthetic construct
  misc_feature 1..20: note = Description of Artificial Sequence: Synthetic oligonucleotide
  misc_feature 1..20: note = Target: ANGPTL4; (-) strand; PAM type: YTN; PAM sequence: CTA
  source 1..20: mol_type = other DNA
gacatagggtgatgattggt

SEQ ID NO: 15722 - DNA, 20 bp, synthetic construct
  misc_feature 1..20: note = Description of Artificial Sequence: Synthetic oligonucleotide
  misc_feature 1..20: note = Target: ANGPTL4; (-) strand; PAM type: YTN; PAM sequence: CTG
  source 1..20: mol_type = other DNA
agctagacatagggtgatga

SEQ ID NO: 15723 - DNA, 20 bp, synthetic construct
  misc_feature 1..20: note = Description of Artificial Sequence: Synthetic oligonucleotide
  misc_feature 1..20: note = Target: ANGPTL4; (-) strand; PAM type: YTN; PAM sequence: TTC
  source 1..20: mol_type = other DNA
acaaaccctgagctagacat

SEQ ID NO: 15724 - DNA, 20 bp, synthetic construct
  misc_feature 1..20: note = Description of Artificial Sequence: Synthetic oligonucleotide
  misc_feature 1..20: note = Target: ANGPTL4; (-) strand; PAM type: YTN; PAM sequence: TTG
  source 1..20: mol_type = other DNA
gtgcattcacaaaccctgag

SEQ ID NO: 15725 - DNA, 20 bp, synthetic construct
  misc_feature 1..20: note = Description of Artificial Sequence: Synthetic oligonucleotide
  misc_feature 1..20: note = Target: ANGPTL4; (-) strand; PAM type: YTN; PAM sequence: TTC
  source 1..20: mol_type = other DNA
attggtgcattcacaaaccc

SEQ ID NO: 15726 - DNA, 20 bp, synthetic construct
  misc_feature 1..20: note = Description of Artificial Sequence: Synthetic oligonucleotide
  misc_feature 1..20: note = Target: ANGPTL4; (-) strand; PAM type: YTN; PAM sequence: CTA
  source 1..20: mol_type = other DNA
gatacagagtgttcattggt

SEQ ID NO: 15727 - DNA, 20 bp, synthetic construct
  misc_feature 1..20: note = Description of Artificial Sequence: Synthetic oligonucleotide
  misc_feature 1..20: note = Target: ANGPTL4; (-) strand; PAM type: YTN; PAM sequence: CTC
  source 1..20: mol_type = other DNA
caaggccccaccagagtagc

SEQ ID NO: 15728 - DNA, 20 bp, synthetic construct
  misc_feature 1..20: note = Description of Artificial Sequence: Synthetic oligonucleotide
  misc_feature 1..20: note = Target: ANGPTL4; (-) strand; PAM type: YTN; PAM sequence: TTC
  source 1..20: mol_type = other DNA
tccaaggccccaccagagta

SEQ ID NO: 15729 - DNA, 20 bp, synthetic construct
  misc_feature 1..20: note = Description of Artificial Sequence: Synthetic oligonucleotide
  misc_feature 1..20: note = Target: ANGPTL4; (-) strand; PAM type: YTN; PAM sequence: CTA
  source 1..20: mol_type = other DNA
gacataaaggttctccaagg

SEQ ID NO: 15730 - DNA, 20 bp, synthetic construct
  misc_feature 1..20: note = Description of Artificial Sequence: Synthetic oligonucleotide
  misc_feature 1..20: note = Target: ANGPTL4; (-) strand; PAM type: YTN; PAM sequence: CTG
  source 1..20: mol_type = other DNA
agctagacataaaggttctc

SEQ ID NO: 15731 - DNA, 20 bp, synthetic construct
  misc_feature 1..20: note = Description of Artificial Sequence: Synthetic oligonucleotide
  misc_feature 1..20: note = Target: ANGPTL4; (-) strand; PAM type: YTN; PAM sequence: TTA
  source 1..20: mol_type = other DNA
caatccctgagctagacata

SEQ ID NO: 15732 - DNA, 20 bp, synthetic construct
  misc_feature 1..20: note = Description of Artificial Sequence: Synthetic oligonucleotide
  misc_feature 1..20: note = Target: ANGPTL4; (-) strand; PAM type: YTN; PAM sequence: TTT
  source 1..20: mol_type = other DNA
acaatccctgagctagacat

SEQ ID NO: 15733 - DNA, 20 bp, synthetic construct
  misc_feature 1..20: note = Description of Artificial Sequence: Synthetic oligonucleotide
  misc_feature 1..20: note = Target: ANGPTL4; (-) strand; PAM type: YTN; PAM sequence: TTG
  source 1..20: mol_type = other DNA
gtgtatttacaatccctgag

SEQ ID NO: 15734 - DNA, 20 bp, synthetic construct
  misc_feature 1..20: note = Description of Artificial Sequence: Synthetic oligonucleotide
  misc_feature 1..20: note = Target: ANGPTL4; (-) strand; PAM type: YTN; PAM sequence: CTA
  source 1..20: mol_type = other DNA
gatacagagtgccgattggt

SEQ ID NO: 15735 - DNA, 20 bp, synthetic construct
  misc_feature 1..20: note = Description of Artificial Sequence: Synthetic oligonucleotide
  misc_feature 1..20: note = Target: ANGPTL4; (-) strand; PAM type: YTN; PAM sequence: TTG
  source 1..20: mol_type = other DNA
agctagatacagagtgccga

SEQ ID NO: 15736 - DNA, 20 bp, synthetic construct
  misc_feature 1..20: note = Description of Artificial Sequence: Synthetic oligonucleotide
  misc_feature 1..20: note = Target: ANGPTL4; (-) strand; PAM type: YTN; PAM sequence: CTT
  source 1..20: mol_type = other DNA
gagctagatacagagtgccg

SEQ ID NO: 15737 - DNA, 20 bp, synthetic construct
  misc_feature 1..20: note = Description of Artificial Sequence: Synthetic oligonucleotide
  misc_feature 1..20: note = Target: ANGPTL4; (-) strand; PAM type: YTN; PAM sequence: TTA
  source 1..20: mol_type = other DNA
caaaccttgagctagataca

SEQ ID NO: 15738 - DNA, 20 bp, synthetic construct
  misc_feature 1..20: note = Description of Artificial Sequence: Synthetic oligonucleotide
  misc_feature 1..20: note = Target: ANGPTL4; (-) strand; PAM type: YTN; PAM sequence: TTT
  source 1..20: mol_type = other DNA
acaaaccttgagctagatac

SEQ ID NO: 15739 - DNA, 20 bp, synthetic construct
  misc_feature 1..20: note = Description of Artificial Sequence: Synthetic oligonucleotide
  misc_feature 1..20: note = Target: ANGPTL4; (-) strand; PAM type: YTN; PAM sequence: TTG
  source 1..20: mol_type = other DNA
gtgtgtttacaaaccttgag

SEQ ID NO: 15740 - DNA, 20 bp, synthetic construct
  misc_feature 1..20: note = Description of Artificial Sequence: Synthetic oligonucleotide
  misc_feature 1..20: note = Target: ANGPTL4; (-) strand; PAM type: YTN; PAM sequence: CTG
  source 1..20: mol_type = other DNA
attggtgtgtttacaaacct

SEQ ID NO: 15741 - DNA, 20 bp, synthetic construct
  misc_feature 1..20: note = Description of Artificial Sequence: Synthetic oligonucleotide
  misc_feature 1..20: note = Target: ANGPTL4; (-) strand; PAM type: YTN; PAM sequence: CTA
  source 1..20: mol_type = other DNA
gacacagggtgctgattggt

SEQ ID NO: 15742 - DNA, 20 bp, synthetic construct
  misc_feature 1..20: note = Description of Artificial Sequence: Synthetic oligonucleotide
  misc_feature 1..20: note = Target: ANGPTL4; (-) strand; PAM type: YTN; PAM sequence: CTG
  source 1..20: mol_type = other DNA
agctagacacagggtgctga

SEQ ID NO: 15743 - DNA, 20 bp, synthetic construct
  misc_feature 1..20: note = Description of Artificial Sequence: Synthetic oligonucleotide
  misc_feature 1..20: note = Target: ANGPTL4; (-) strand; PAM type: YTN; PAM sequence: TTC
  source 1..20: mol_type = other DNA
acaaaccctgagctagacac

SEQ ID NO: 15744 - DNA, 20 bp, synthetic construct
  misc_feature 1..20: note = Description of Artificial Sequence: Synthetic oligonucleotide
  misc_feature 1..20: note = Target: ANGPTL4; (-) strand; PAM type: YTN; PAM sequence: TTG
  source 1..20: mol_type = other DNA
gtgcattcacaaaccctgag

SEQ ID NO: 15745 - DNA, 20 bp, synthetic construct
  misc_feature 1..20: note = Description of Artificial Sequence: Synthetic oligonucleotide
  misc_feature 1..20: note = Target: ANGPTL4; (-) strand; PAM type: YTN; PAM sequence: CTA
  source 1..20: mol_type = other DNA
gatacagagtgtcgattggt

SEQ ID NO: 15746 - DNA, 20 bp, synthetic construct
  misc_feature 1..20: note = Description of Artificial Sequence: Synthetic oligonucleotide
  misc_feature 1..20: note = Target: ANGPTL4; (-) strand; PAM type: YTN; PAM sequence: CTC
  source 1..20: mol_type = other DNA
caaggccccaccacagtagc

SEQ ID NO: 15747 - DNA, 20 bp, synthetic construct
  misc_feature 1..20: note = Description of Artificial Sequence: Synthetic oligonucleotide
  misc_feature 1..20: note = Target: ANGPTL4; (-) strand; PAM type: YTN; PAM sequence: TTC
  source 1..20: mol_type = other DNA
tccaaggccccaccacagta

SEQ ID NO: 15748 - DNA, 20 bp, synthetic construct
  misc_feature 1..20: note = Description of Artificial Sequence: Synthetic oligonucleotide
  misc_feature 1..20: note = Target: ANGPTL4; (-) strand; PAM type: YTN; PAM sequence: CTA
  source 1..20: mol_type = other DNA
gatacagagtgtcaacacaa

SEQ ID NO: 15749 - DNA, 20 bp, synthetic construct
  misc_feature 1..20: note = Description of Artificial Sequence: Synthetic oligonucleotide
  misc_feature 1..20: note = Target: ANGPTL4; (-) strand; PAM type: YTN; PAM sequence: TTA
  source 1..20: mol_type = other DNA
actagatacagagtgtcaac

SEQ ID NO: 15750 - DNA, 20 bp, synthetic construct
  misc_feature 1..20: note = Description of Artificial Sequence: Synthetic oligonucleotide
  misc_feature 1..20: note = Target: ANGPTL4; (-) strand; PAM type: YTN; PAM sequence: CTC
  source 1..20: mol_type = other DNA
cacatccccaccagattaac

SEQ ID NO: 15751 - DNA, 20 bp, synthetic construct
  misc_feature 1..20: note = Description of Artificial Sequence: Synthetic oligonucleotide
  misc_feature 1..20: note = Target: ANGPTL4; (-) strand; PAM type: YTN; PAM sequence: TTC
  source 1..20: mol_type = other DNA
tccacatccccaccagatta

SEQ ID NO: 15752 - DNA, 20 bp, synthetic construct
  misc_feature 1..20: note = Description of Artificial Sequence: Synthetic oligonucleotide
  misc_feature 1..20: note = Target: ANGPTL4; (-) strand; PAM type: YTN; PAM sequence: CTA
  source 1..20: mol_type = other DNA
gacacaaaggttctccacat

SEQ ID NO: 15753 - DNA, 20 bp, synthetic construct
  misc_feature 1..20: note = Description of Artificial Sequence: Synthetic oligonucleotide
  misc_feature 1..20: note = Target: ANGPTL4; (-) strand; PAM type: YTN; PAM sequence: CTG
  source 1..20: mol_type = other DNA
agctagacacaaaggttctc

SEQ ID NO: 15754 - DNA, 20 bp, synthetic construct
  misc_feature 1..20: note = Description of Artificial Sequence: Synthetic oligonucleotide
  misc_feature 1..20: note = Target: ANGPTL4; (-) strand; PAM type: YTN; PAM sequence: TTC
  source 1..20: mol_type = other DNA
ctgagctagacacaaaggtt

SEQ ID NO: 15755 - DNA, 20 bp, synthetic construct
  misc_feature 1..20: note = Description of Artificial Sequence: Synthetic oligonucleotide
  misc_feature 1..20: note = Target: ANGPTL4; (-) strand; PAM type: YTN; PAM sequence: TTA
  source 1..20: mol_type = other DNA
caattcctgagctagacaca

SEQ ID NO: 15756 - DNA, 20 bp, synthetic construct
  misc_feature 1..20: note = Description of Artificial Sequence: Synthetic oligonucleotide
  misc_feature 1..20: note = Target: ANGPTL4; (-) strand; PAM type: YTN; PAM sequence: TTT
  source 1..20: mol_type = other DNA
acaattcctgagctagacac

SEQ ID NO: 15757 - DNA, 20 bp, synthetic construct
  misc_feature 1..20: note = Description of Artificial Sequence: Synthetic oligonucleotide
  misc_feature 1..20: note = Target: ANGPTL4; (-) strand; PAM type: YTN; PAM sequence: TTG
  source 1..20: mol_type = other DNA
gtgcgtttacaattcctgag

SEQ ID NO: 15758 - DNA, 20 bp, synthetic construct
  misc_feature 1..20: note = Description of Artificial Sequence: Synthetic oligonucleotide
  misc_feature 1..20: note = Target: ANGPTL4; (-) strand; PAM type: YTN; PAM sequence: CTG
  source 1..20: mol_type = other DNA
attggtgcgtttacaattcc

SEQ ID NO: 15759 - DNA, 20 bp, synthetic construct
  misc_feature 1..20: note = Description of Artificial Sequence: Synthetic oligonucleotide
  misc_feature 1..20: note = Target: ANGPTL4; (-) strand; PAM type: YTN; PAM sequence: TTG
  source 1..20: mol_type = other DNA
acagggcgctgattggtgcg

SEQ ID NO: 15760 - DNA, 20 bp, synthetic construct
  misc_feature 1..20: note = Description of Artificial Sequence: Synthetic oligonucleotide
  misc_feature 1..20: note = Target: ANGPTL4; (-) strand; PAM type: YTN; PAM sequence: TTT
  source 1..20: mol_type = other DNA
gacagggcgctgattggtgc

SEQ ID NO: 15761 - DNA, 20 bp, synthetic construct
  misc_feature 1..20: note = Description of Artificial Sequence: Synthetic oligonucleotide
  misc_feature 1..20: note = Target: ANGPTL4; (-) strand; PAM type: YTN; PAM sequence: TTT
  source 1..20: mol_type = other DNA
tgacagggcgctgattggtg

SEQ ID NO: 15762 - DNA, 20 bp, synthetic construct
  misc_feature 1..20: note = Description of Artificial Sequence: Synthetic oligonucleotide
  misc_feature 1..20: note = Target: ANGPTL4; (-) strand; PAM type: YTN; PAM sequence: CTG
  source 1..20: mol_type = other DNA
ttttgacagggcgctgattg

SEQ ID NO: 15763 - DNA, 20 bp, synthetic construct
  misc_feature 1..20: note = Description of Artificial Sequence: Synthetic oligonucleotide
  misc_feature 1..20: note = Target: ANGPTL4; (-) strand; PAM type: YTN; PAM sequence: CTG
  source 1..20: mol_type = other DNA
gtctgttttgacagggcgct

SEQ ID NO: 15764 - DNA, 20 bp, synthetic construct
  misc_feature 1..20: note = Description of Artificial Sequence: Synthetic oligonucleotide
  misc_feature 1..20: note = Target: ANGPTL4; (-) strand; PAM type: YTN; PAM sequence: TTG
  source 1..20: mol_type = other DNA
gtagagcccactggtctgtt

SEQ ID NO: 15765 - DNA, 20 bp, synthetic construct
  misc_feature 1..20: note = Description of Artificial Sequence: Synthetic oligonucleotide
  misc_feature 1..20: note = Target: ANGPTL4; (-) strand; PAM type: YTN; PAM sequence: CTG
  source 1..20: mol_type = other DNA
attggtagagcccactggtc

SEQ ID NO: 15766 - DNA, 20 bp, synthetic construct
  misc_feature 1..20: note = Description of Artificial Sequence: Synthetic oligonucleotide
  misc_feature 1..20: note = Target: ANGPTL4; (-) strand; PAM type: YTN; PAM sequence: CTG
  source 1..20: mol_type = other DNA
ctgattggtagagcccactg

SEQ ID NO: 15767 - DNA, 20 bp, synthetic construct
  misc_feature 1..20: note = Description of Artificial Sequence: Synthetic oligonucleotide
  misc_feature 1..20: note = Target: ANGPTL4; (-) strand; PAM type: YTN; PAM sequence: CTG
  source 1..20: mol_type = other DNA
gccccacccacatcctgctg

SEQ ID NO: 15768 - DNA, 20 bp, synthetic construct
  misc_feature 1..20: note = Description of Artificial Sequence: Synthetic oligonucleotide
  misc_feature 1..20: note = Target: ANGPTL4; (-) strand; PAM type: YTN; PAM sequence: TTA
  source 1..20: mol_type = other DNA
tctggccccacccacatcct

SEQ ID NO: 15769 - DNA, 20 bp, synthetic construct
  misc_feature 1..20: note = Description of Artificial Sequence: Synthetic oligonucleotide
  misc_feature 1..20: note = Target: ANGPTL4; (-) strand; PAM type: YTN; PAM sequence: CTT
  source 1..20: mol_type = other DNA
atctggccccacccacatcc

SEQ ID NO: 15770 - DNA, 20 bp, synthetic construct
  misc_feature 1..20: note = Description of Artificial Sequence: Synthetic oligonucleotide
  misc_feature 1..20: note = Target: ANGPTL4; (-) strand; PAM type: YTN; PAM sequence: CTC
  source 1..20: mol_type = other DNA
ttatctggccccacccacat

SEQ ID NO: 15771 - DNA, 20 bp, synthetic construct
  misc_feature 1..20: note = Description of Artificial Sequence: Synthetic oligonucleotide
  misc_feature 1..20: note = Target: ANGPTL4; (-) strand; PAM type: YTN; PAM sequence: TTC
  source 1..20: mol_type = other DNA
tcttatctggccccacccac

SEQ ID NO: 15772 - DNA, 20 bp, synthetic construct
  misc_feature 1..20: note = Description of Artificial Sequence: Synthetic oligonucleotide
  misc_feature 1..20: note = Target: ANGPTL4; (-) strand; PAM type: YTN; PAM sequence: TTA
  source 1..20: mol_type = other DNA
ttctcttatctggccccacc

SEQ ID NO: 15773 - DNA, 20 bp, synthetic construct
  misc_feature 1..20: note = Description of Artificial Sequence: Synthetic oligonucleotide
  misc_feature 1..20: note = Target: ANGPTL4; (-) strand; PAM type: YTN; PAM sequence: TTT
  source 1..20: mol_type = other DNA
attctcttatctggccccac

SEQ ID NO: 15774 - DNA, 20 bp, synthetic construct
  misc_feature 1..20: note = Description of Artificial Sequence: Synthetic oligonucleotide
  misc_feature 1..20: note = Target: ANGPTL4; (-) strand; PAM type: YTN; PAM sequence: TTT
  source 1..20: mol_type = other DNA
tattctcttatctggcccca

SEQ ID NO: 15775 - DNA, 20 bp, synthetic construct
  misc_feature 1..20: note = Description of Artificial Sequence: Synthetic oligonucleotide
  misc_feature 1..20: note = Target: ANGPTL4; (-) strand; PAM type: YTN; PAM sequence: CTT
  source 1..20: mol_type = other DNA
ttattctcttatctggcccc

SEQ ID NO: 15776 - DNA, 20 bp, synthetic construct
  misc_feature 1..20: note = Description of Artificial Sequence: Synthetic oligonucleotide
  misc_feature 1..20: note = Target: ANGPTL4; (-) strand; PAM type: YTN; PAM sequence: CTG
  source 1..20: mol_type = other DNA
cttttattctcttatctggc

SEQ ID NO: 15777 - DNA, 20 bp, synthetic construct
  misc_feature 1..20: note = Description of Artificial Sequence: Synthetic oligonucleotide
  misc_feature 1..20: note = Target: ANGPTL4; (-) strand; PAM type: YTN; PAM sequence: CTC
  source 1..20: mol_type = other DNA
gggcagcctgcttttattct

SEQ ID NO: 15778 - DNA, 20 bp, synthetic construct
  misc_feature 1..20: note = Description of Artificial Sequence: Synthetic oligonucleotide
  misc_feature 1..20: note = Target: ANGPTL4; (-) strand; PAM type: YTN; PAM sequence: CTG
  source 1..20: mol_type = other DNA
gctcgggcagcctgctttta

SEQ ID NO: 15779 - DNA, 20 bp, synthetic construct
  misc_feature 1..20: note = Description of Artificial Sequence: Synthetic oligonucleotide
  misc_feature 1..20: note = Target: ANGPTL4; (-) strand; PAM type: YTN; PAM sequence: CTG
  source 1..20: mol_type = other DNA
ctggctcgggcagcctgctt

SEQ ID NO: 15780 - DNA, 20 bp, synthetic construct
  misc_feature 1..20: note = Description of Artificial Sequence: Synthetic oligonucleotide
  misc_feature 1..20: note = Target: ANGPTL4; (-) strand; PAM type: YTN; PAM sequence: TTG
  source 1..20: mol_type = other DNA
ccactgctggctcgggcagc

SEQ ID NO: 15781 - DNA, 20 bp, synthetic construct
  misc_feature 1..20: note = Description of Artificial Sequence: Synthetic oligonucleotide
  misc_feature 1..20: note = Target: ANGPTL4; (-) strand; PAM type: YTN; PAM sequence: TTC
  source 1..20: mol_type = other DNA
cacagtgtggaaggggaccc

SEQ ID NO: 15782 - DNA, 20 bp, synthetic construct
  misc_feature 1..20: note = Description of Artificial Sequence: Synthetic oligonucleotide
  misc_feature 1..20: note = Target: ANGPTL4; (-) strand; PAM type: YTN; PAM sequence: CTT
  source 1..20: mol_type = other DNA
ccacagtgtggaaggggacc

SEQ ID NO: 15783 - DNA, 20 bp, synthetic construct
  misc_feature 1..20: note = Description of Artificial Sequence: Synthetic oligonucleotide
  misc_feature 1..20: note = Target: ANGPTL4; (-) strand; PAM type: YTN; PAM sequence: TTG
  source 1..20: mol_type = other DNA
caaagagcaaaagaacaaag

SEQ ID NO: 15784 - DNA, 20 bp, synthetic construct
  misc_feature 1..20: note = Description of Artificial Sequence: Synthetic oligonucleotide
  misc_feature 1..20: note = Target: ANGPTL4; (-) strand; PAM type: YTN; PAM sequence: TTA
  source 1..20: mol_type = other DNA
ttgcaaagagcaaaagaaca

SEQ ID NO: 15785 - DNA, 20 bp, synthetic construct
  misc_feature 1..20: note = Description of Artificial Sequence: Synthetic oligonucleotide
  misc_feature 1..20: note = Target: ANGPTL4; (-) strand; PAM type: YTN; PAM sequence: TTT
  source 1..20: mol_type = other DNA
attgcaaagagcaaaagaac

SEQ ID NO: 15786 - DNA, 20 bp, synthetic construct
  misc_feature 1..20: note = Description of Artificial Sequence: Synthetic oligonucleotide
  misc_feature 1..20: note = Target: ANGPTL4; (-) strand; PAM type: YTN; PAM sequence: CTC
  source 1..20: mol_type = other DNA
ataaaagcagtggggaccca

SEQ ID NO: 15787 - DNA, 20 bp, synthetic construct
  misc_feature 1..20: note = Description of Artificial Sequence: Synthetic oligonucleotide
  misc_feature 1..20: note = Target: ANGPTL4; (-) strand; PAM type: YTN; PAM sequence: TTA
  source 1..20: mol_type = other DNA
cagctcataaaagcagtggg

SEQ ID NO: 15788 - DNA, 20 bp, synthetic construct
  misc_feature 1..20: note = Description of Artificial Sequence: Synthetic oligonucleotide
  misc_feature 1..20: note = Target: ANGPTL4; (-) strand; PAM type: YTN; PAM sequence: TTC
  source 1..20: mol_type = other DNA
gcagtgagtgttacagctca

SEQ ID NO: 15789 - DNA, 20 bp, synthetic construct
  misc_feature 1..20: note = Description of Artificial Sequence: Synthetic oligonucleotide
  misc_feature 1..20: note = Target: ANGPTL4; (-) strand; PAM type: YTN; PAM sequence: CTT
  source 1..20: mol_type = other DNA
cgcagtgagtgttacagctc

SEQ ID NO: 15790 - DNA, 20 bp, synthetic construct
  misc_feature 1..20: note = Description of Artificial Sequence: Synthetic oligonucleotide
  misc_feature 1..20: note = Target: ANGPTL4; (-) strand; PAM type: YTN; PAM sequence: CTG
  source 1..20: mol_type = other DNA
cagaccttcgcagtgagtgt

SEQ ID NO: 15791 - DNA, 20 bp, synthetic construct
  misc_feature 1..20: note = Description of Artificial Sequence: Synthetic oligonucleotide
  misc_feature 1..20: note = Target: ANGPTL4; (-) strand; PAM type: YTN; PAM sequence: CTC
  source 1..20: mol_type = other DNA
aggagtgaagctgcagacct

SEQ ID NO: 15792 - DNA, 20 bp, synthetic construct
  misc_feature 1..20: note = Description of Artificial Sequence: Synthetic oligonucleotide
  misc_feature 1..20: note = Target: ANGPTL4; (-) strand; PAM type: YTN; PAM sequence: CTG
  source 1..20: mol_type = other DNA
gctcaggagtgaagctgcag

SEQ ID NO: 15793 - DNA, 20 bp, synthetic construct
  misc_feature 1..20: note = Description of Artificial Sequence: Synthetic oligonucleotide
  misc_feature 1..20: note = Target: ANGPTL4; (-) strand; PAM type: YTN; PAM sequence: TTC
  source 1..20: mol_type = other DNA
actggctcaggagtgaagct

SEQ ID NO: 15794 - DNA, 20 bp, synthetic construct
  misc_feature 1..20: note = Description of Artificial Sequence: Synthetic oligonucleotide
  misc_feature 1..20: note = Target: ANGPTL4; (-) strand; PAM type: YTN; PAM sequence: TTT
  source 1..20: mol_type = other DNA
cactggctcaggagtgaagc

SEQ ID NO: 15795 - DNA, 20 bp, synthetic construct
  misc_feature 1..20: note = Description of Artificial Sequence: Synthetic oligonucleotide
  misc_feature 1..20: note = Target: ANGPTL4; (-) strand; PAM type: YTN; PAM sequence: TTC
  source 1..20: mol_type = other DNA
atggtttcactggctcagga

SEQ ID NO: 15796 - DNA, 20 bp, synthetic construct
  misc_feature 1..20: note = Description of Artificial Sequence: Synthetic oligonucleotide
  misc_feature 1..20: note = Target: ANGPTL4; (-) strand; PAM type: YTN; PAM sequence: CTG
  source 1..20: mol_type = other DNA
gtgggttcatggtttcactg

SEQ ID NO: 15797 - DNA, 20 bp, synthetic construct
  misc_feature 1..20: note = Description of Artificial Sequence: Synthetic oligonucleotide
  misc_feature 1..20: note = Target: ANGPTL4; (-) strand; PAM type: YTN; PAM sequence: TTC
  source 1..20: mol_type = other DNA
tggtgggttcatggtttcac

SEQ ID NO: 15798 - DNA, 20 bp, synthetic construct
  misc_feature 1..20: note = Description of Artificial Sequence: Synthetic oligonucleotide
  misc_feature 1..20: note = Target: ANGPTL4; (-) strand; PAM type: YTN; PAM sequence: CTT
  source 1..20: mol_type = other DNA
ctggtgggttcatggtttca

SEQ ID NO: 15799 - DNA, 20 bp, synthetic construct
  misc_feature 1..20: note = Description of Artificial Sequence: Synthetic oligonucleotide
  misc_feature 1..20: note = Target: ANGPTL4; (-) strand; PAM type: YTN; PAM sequence: TTC
  source 1..20: mol_type = other DNA
cttctggtgggttcatggtt

SEQ ID NO: 15800 - DNA, 20 bp, synthetic construct
  misc_feature 1..20: note = Description of Artificial Sequence: Synthetic oligonucleotide
  misc_feature 1..20: note = Target: ANGPTL4; (-) strand; PAM type: YTN; PAM sequence: CTT
  source 1..20: mol_type = other DNA
ccttctggtgggttcatggt

SEQ ID NO: 15801 - DNA, 20 bp, synthetic construct
  misc_feature 1..20: note = Description of Artificial Sequence: Synthetic oligonucleotide
  misc_feature 1..20: note = Target: ANGPTL4; (-) strand; PAM type: YTN; PAM sequence: TTC
  source 1..20: mol_type = other DNA
ttccttctggtgggttcatg

SEQ ID NO: 15802 - DNA, 20 bp, synthetic construct
  misc_feature 1..20: note = Description of Artificial Sequence: Synthetic oligonucleotide
  misc_feature 1..20: note = Target: ANGPTL4; (-) strand; PAM type: YTN; PAM sequence: TTT
  source 1..20: mol_type = other DNA
cttccttctggtgggttcat

SEQ ID NO: 15803 - DNA, 20 bp, synthetic construct
  misc_feature 1..20: note = Description of Artificial Sequence: Synthetic oligonucleotide
  misc_feature 1..20: note = Target: ANGPTL4; (-) strand; PAM type: YTN; PAM sequence: TTC
  source 1..20: mol_type = other DNA
agcgtttcttccttctggtg

SEQ ID NO: 15804 - DNA, 20 bp, synthetic construct
  misc_feature 1..20: note = Description of Artificial Sequence: Synthetic oligonucleotide
  misc_feature 1..20: note = Target: ANGPTL4; (-) strand; PAM type: YTN; PAM sequence: TTC
  source 1..20: mol_type = other DNA
aggtgtgttcagcgtttctt

SEQ ID NO: 15805 - DNA, 20 bp, synthetic construct
  misc_feature 1..20: note = Description of Artificial Sequence: Synthetic oligonucleotide
  misc_feature 1..20: note = Target: ANGPTL4; (-) strand; PAM type: YTN; PAM sequence: CTG
  source 1..20: mol_type = other DNA
atgttcaggtgtgttcagcg

SEQ ID NO: 15806 - DNA, 20 bp, synthetic construct
  misc_feature 1..20: note = Description of Artificial Sequence: Synthetic oligonucleotide
  misc_feature 1..20: note = Target: ANGPTL4; (-) strand; PAM type: YTN; PAM sequence: TTC
  source 1..20: mol_type = other DNA
tgatgttcaggtgtgttcag

SEQ ID NO: 15807 - DNA, 20 bp, synthetic construct
  misc_feature 1..20: note = Description of Artificial Sequence: Synthetic oligonucleotide
  misc_feature 1..20: note = Target: ANGPTL4; (-) strand; PAM type: YTN; PAM sequence: CTT
  source 1..20: mol_type = other DNA
ctgatgttcaggtgtgttca

SEQ ID NO: 15808 - DNA, 20 bp, synthetic construct
  misc_feature 1..20: note = Description of Artificial Sequence: Synthetic oligonucleotide
  misc_feature 1..20: note = Target: ANGPTL4; (-) strand; PAM type: YTN; PAM sequence: TTC
  source 1..20: mol_type = other DNA
ttctgatgttcaggtgtgtt

SEQ ID NO: 15809 - DNA, 20 bp, synthetic construct
  misc_feature 1..20: note = Description of Artificial Sequence: Synthetic oligonucleotide
  misc_feature 1..20: note = Target: ANGPTL4; (-) strand; PAM type: YTN; PAM sequence: TTT
  source 1..20: mol_type = other DNA
cttctgatgttcaggtgtgt

SEQ ID NO: 15810 - DNA, 20 bp, synthetic construct
  misc_feature 1..20: note = Description of Artificial Sequence: Synthetic oligonucleotide
  misc_feature 1..20: note = Target: ANGPTL4; (-) strand; PAM type: YTN; PAM sequence: TTG
  source 1..20: mol_type = other DNA
tttcttctgatgttcaggtg

SEQ ID NO: 15811 - DNA, 20 bp, synthetic construct
  misc_feature 1..20: note = Description of Artificial Sequence: Synthetic oligonucleotide
  misc_feature 1..20: note = Target: ANGPTL4; (-) strand; PAM type: YTN; PAM sequence: TTT
  source 1..20: mol_type = other DNA
gtttcttctgatgttcaggt

SEQ ID NO: 15812 - DNA, 20 bp, synthetic construct
  misc_feature 1..20: note = Description of Artificial Sequence: Synthetic oligonucleotide
  misc_feature 1..20: note = Target: ANGPTL4; (-) strand; PAM type: YTN; PAM sequence: CTG
  source 1..20: mol_type = other DNA
gagtttgtttcttctgatgt

SEQ ID NO: 15813 - DNA, 20 bp, synthetic construct
  misc_feature 1..20: note = Description of Artificial Sequence: Synthetic oligonucleotide
  misc_feature 1..20: note = Target: ANGPTL4; (-) strand; PAM type: YTN; PAM sequence: TTA
  source 1..20: mol_type = other DNA
aggtggcgcgtctggagttt

SEQ ID NO: 15814 - DNA, 20 bp, synthetic construct
  misc_feature 1..20: note = Description of Artificial Sequence: Synthetic oligonucleotide
  misc_feature 1..20: note = Target: ANGPTL4; (-) strand; PAM type: YTN; PAM sequence: CTT
  source 1..20: mol_type = other DNA
aaggtggcgcgtctggagtt

SEQ ID NO: 15815 - DNA, 20 bp, synthetic construct
  misc_feature 1..20: note = Description of Artificial Sequence: Synthetic oligonucleotide
  misc_feature 1..20: note = Target: ANGPTL4; (-) strand; PAM type: YTN; PAM sequence: CTC
  source 1..20: mol_type = other DNA
ttaaggtggcgcgtctggag

SEQ ID NO: 15816 - DNA, 20 bp, synthetic construct
  misc_feature 1..20: note = Description of Artificial Sequence: Synthetic oligonucleotide
  misc_feature 1..20: note = Target: ANGPTL4; (-) strand; PAM type: YTN; PAM sequence: TTC
  source 1..20: mol_type = other DNA
cagctcttaaggtggcgcgt

SEQ ID NO: 15817 - DNA, 20 bp, synthetic construct
  misc_feature 1..20: note = Description of Artificial Sequence: Synthetic oligonucleotide
  misc_feature 1..20: note = Target: ANGPTL4; (-) strand; PAM type: YTN; PAM sequence: TTG
  source 1..20: mol_type = other DNA
cggtaagtgttccagctctt

SEQ ID NO: 15818 - DNA, 20 bp, synthetic construct
  misc_feature 1..20: note = Description of Artificial Sequence: Synthetic oligonucleotide
  misc_feature 1..20: note = Target: ANGPTL4; (-) strand; PAM type: YTN; PAM sequence: CTT
  source 1..20: mol_type = other DNA
gcggtaagtgttccagctct

SEQ ID NO: 15819 - DNA, 20 bp, synthetic construct
  misc_feature 1..20: note = Description of Artificial Sequence: Synthetic oligonucleotide
  misc_feature 1..20: note = Target: ANGPTL4; (-) strand; PAM type: YTN; PAM sequence: TTC
  source 1..20: mol_type = other DNA
aagaatgaagccatggaccc

SEQ ID NO: 15820 - DNA, 20 bp, synthetic construct
  misc_feature 1..20: note = Description of Artificial Sequence: Synthetic oligonucleotide
  misc_feature 1..20: note = Target: ANGPTL4; (-) strand; PAM type: YTN; PAM sequence: CTT
  source 1..20: mol_type = other DNA
caagaatgaagccatggacc

SEQ ID NO: 15821 - DNA, 20 bp, synthetic construct
  misc_feature 1..20: note = Description of Artificial Sequence: Synthetic oligonucleotide
  misc_feature 1..20: note = Target: ANGPTL4; (-) strand; PAM type: YTN; PAM sequence: CTG
  source 1..20: mol_type = other DNA
acttcaagaatgaagccatg

SEQ ID NO: 15822 - DNA, 20 bp, synthetic construct
  misc_feature 1..20: note = Description of Artificial Sequence: Synthetic oligonucleotide
  misc_feature 1..20: note = Target: ANGPTL4; (-) strand; PAM type: YTN; PAM sequence: CTC
  source 1..20: mol_type = other DNA
actgacttcaagaatgaagc

SEQ ID NO: 15823 - DNA, 20 bp, synthetic construct
  misc_feature 1..20: note = Description of Artificial Sequence: Synthetic oligonucleotide
  misc_feature 1..20: note = Target: ANGPTL4; (-) strand; PAM type: YTN; PAM sequence: TTG
  source 1..20: mol_type = other DNA
gtctcactgacttcaagaat

SEQ ID NO: 15824 - DNA, 20 bp, synthetic construct
  misc_feature 1..20: note = Description of Artificial Sequence: Synthetic oligonucleotide
  misc_feature 1..20: note = Target: ANGPTL4; (-) strand; PAM type: YTN; PAM sequence: CTT
  source 1..20: mol_type = other DNA
ggtctcactgacttcaagaa

SEQ ID NO: 15825 - DNA, 20 bp, synthetic construct
  misc_feature 1..20: note = Description of Artificial Sequence: Synthetic oligonucleotide
  misc_feature 1..20: note = Target: ANGPTL4; (-) strand; PAM type: YTN; PAM sequence: TTC
  source 1..20: mol_type = other DNA
ttggtctcactgacttcaag

SEQ ID NO: 15826 - DNA, 20 bp, synthetic construct
  misc_feature 1..20: note = Description of Artificial Sequence: Synthetic oligonucleotide
  misc_feature 1..20: note = Target: ANGPTL4; (-) strand; PAM type: YTN; PAM sequence: TTG
  source 1..20: mol_type = other DNA
gggggttcttggtctcactg

SEQ ID NO: 15827 - DNA, 20 bp, synthetic construct
  misc_feature 1..20: note = Description of Artificial Sequence: Synthetic oligonucleotide
  misc_feature 1..20: note = Target: ANGPTL4; (-) strand; PAM type: YTN; PAM sequence: CTG
  source 1..20: mol_type = other DNA
tatccggaattggggggttc

SEQ ID NO: 15828 - DNA, 20 bp, synthetic construct
  misc_feature 1..20: note = Description of Artificial Sequence: Synthetic oligonucleotide
  misc_feature 1..20: note = Target: ANGPTL4; (-) strand; PAM type: YTN; PAM sequence: CTG
  source 1..20: mol_type = other DNA
gagtgcagtggcactgtatc

SEQ ID NO: 15829 - DNA, 20 bp, synthetic construct
  misc_feature 1..20: note = Description of Artificial Sequence: Synthetic oligonucleotide
  misc_feature 1..20: note = Target: ANGPTL4; (-) strand; PAM type: YTN; PAM sequence: CTG
  source 1..20: mol_type = other DNA
ggctggagtgcagtggcact

SEQ ID NO: 15830 - DNA, 20 bp, synthetic construct
  misc_feature 1..20: note = Description of Artificial Sequence: Synthetic oligonucleotide
  misc_feature 1..20: note = Target: ANGPTL4; (-) strand; PAM type: YTN; PAM sequence: TTG
  source 1..20: mol_type = other DNA
cctgggctggagtgcagtgg

SEQ ID NO: 15831 - DNA, 20 bp, synthetic construct
  misc_feature 1..20: note = Description of Artificial Sequence: Synthetic oligonucleotide
  misc_feature 1..20: note = Target: ANGPTL4; (-) strand; PAM type: YTN; PAM sequence: CTG
  source 1..20: mol_type = other DNA
ttgcctgggctggagtgcag

SEQ ID NO: 15832 - DNA, 20 bp, synthetic construct
  misc_feature 1..20: note = Description of Artificial Sequence: Synthetic oligonucleotide
  misc_feature 1..20: note = Target: ANGPTL4; (-) strand; PAM type: YTN; PAM sequence: CTC
  source 1..20: mol_type = other DNA
tgttgcctgggctggagtgc

SEQ ID NO: 15833 - DNA, 20 bp, synthetic construct
  misc_feature 1..20: note = Description of Artificial Sequence: Synthetic oligonucleotide
  misc_feature 1..20: note = Target: ANGPTL4; (-) strand; PAM type: YTN; PAM sequence: CTC
  source 1..20: mol_type = other DNA
gctctgttgcctgggctgga

SEQ ID NO: 15834 - DNA, 20 bp, synthetic construct
  misc_feature 1..20: note = Description of Artificial Sequence: Synthetic oligonucleotide
  misc_feature 1..20: note = Target: ANGPTL4; (-) strand; PAM type: YTN; PAM sequence: TTA
  source 1..20: mol_type = other DNA
gacagaatctcgctctgttg

SEQ ID NO: 15835 - DNA, 20 bp, synthetic construct
  misc_feature 1..20: note = Description of Artificial Sequence: Synthetic oligonucleotide
  misc_feature 1..20: note = Target: ANGPTL4; (-) strand; PAM type: YTN; PAM sequence: TTT
  source 1..20: mol_type = other DNA
agacagaatctcgctctgtt

SEQ ID NO: 15836 - DNA, 20 bp, synthetic construct
  misc_feature 1..20: note = Description of Artificial Sequence: Synthetic oligonucleotide
  misc_feature 1..20: note = Target: ANGPTL4; (-) strand; PAM type: YTN; PAM sequence: TTT
  source 1..20: mol_type = other DNA
tagacagaatctcgctctgt

SEQ ID NO: 15837 - DNA, 20 bp, synthetic construct
  misc_feature 1..20: note = Description of Artificial Sequence: Synthetic oligonucleotide
  misc_feature 1..20: note = Target: ANGPTL4; (-) strand; PAM type: YTN; PAM sequence: TTT
  source 1..20: mol_type = other DNA
ttagacagaatctcgctctg

SEQ ID NO: 15838 - DNA, 20 bp, synthetic construct
  misc_feature 1..20: note = Description of Artificial Sequence: Synthetic oligonucleotide
  misc_feature 1..20: note = Target: ANGPTL4; (-) strand; PAM type: YTN; PAM sequence: TTT
  source 1..20: mol_type = other DNA
tttagacagaatctcgctct

SEQ ID NO: 15839 - DNA, 20 bp, synthetic construct
  misc_feature 1..20: note = Description of Artificial Sequence: Synthetic oligonucleotide
  misc_feature 1..20: note = Target: ANGPTL4; (-) strand; PAM type: YTN; PAM sequence: TTA
  source 1..20: mol_type = other DNA
ttttttagacagaatctcgc

SEQ ID NO: 15840 - DNA, 20 bp, synthetic construct
  misc_feature 1..20: note = Description of Artificial Sequence: Synthetic oligonucleotide
  misc_feature 1..20: note = Target: ANGPTL4; (-) strand; PAM type: YTN; PAM sequence: TTT
  source 1..20: mol_type = other DNA
attttttagacagaatctcg

SEQ ID NO: 15841 - DNA, 20 bp, synthetic construct
  misc_feature 1..20: note = Description of Artificial Sequence: Synthetic oligonucleotide
  misc_feature 1..20: note = Target: ANGPTL4; (-) strand; PAM type: YTN; PAM sequence: TTA
  source 1..20: mol_type = other DNA
tttattttttagacagaatc

SEQ ID NO: 15842 - DNA, 20 bp, synthetic construct
  misc_feature 1..20: note = Description of Artificial Sequence: Synthetic oligonucleotide
  misc_feature 1..20: note = Target: ANGPTL4; (-) strand; PAM type: YTN; PAM sequence: TTT
  source 1..20: mol_type = other DNA
atttattttttagacagaat

SEQ ID NO: 15843 - DNA, 20 bp, synthetic construct
  misc_feature 1..20: note = Description of Artificial Sequence: Synthetic oligonucleotide
  misc_feature 1..20: note = Target: ANGPTL4; (-) strand; PAM type: YTN; PAM sequence: TTA
  source 1..20: mol_type = other DNA
tttatttattttttagacag

SEQ ID NO: 15844 - DNA, 20 bp, synthetic construct
  misc_feature 1..20: note = Description of Artificial Sequence: Synthetic oligonucleotide
  misc_feature 1..20: note = Target: ANGPTL4; (-) strand; PAM type: YTN; PAM sequence: TTT
  source 1..20: mol_type = other DNA
atttatttattttttagaca

SEQ ID NO: 15845 - DNA, 20 bp, synthetic construct
  misc_feature 1..20: note = Description of Artificial Sequence: Synthetic oligonucleotide
  misc_feature 1..20: note = Target: ANGPTL4; (-) strand; PAM type: YTN; PAM sequence: TTC
  source 1..20: mol_type = other DNA
atatttatttatttattttt

SEQ ID NO: 15846 - DNA, 20 bp, synthetic construct
  misc_feature 1..20: note = Description of Artificial Sequence: Synthetic oligonucleotide
  misc_feature 1..20: note = Target: ANGPTL4; (-) strand; PAM type: YTN; PAM sequence: TTT
  source 1..20: mol_type = other DNA
catatttatttatttatttt

SEQ ID NO: 15847 - DNA, 20 bp, synthetic construct
  misc_feature 1..20: note = Description of Artificial Sequence: Synthetic oligonucleotide
  misc_feature 1..20: note = Target: ANGPTL4; (-) strand; PAM type: YTN; PAM sequence: TTA
  source 1..20: mol_type = other DNA
tttcatatttatttatttat

SEQ ID NO: 15848 - DNA, 20 bp, synthetic construct
  misc_feature 1..20: note = Description of Artificial Sequence: Synthetic oligonucleotide
  misc_feature 1..20: note = Target: ANGPTL4; (-) strand; PAM type: YTN; PAM sequence: TTT
  source 1..20: mol_type = other DNA
atttcatatttatttattta

SEQ ID NO: 15849 - DNA, 20 bp, synthetic construct
  misc_feature 1..20: note = Description of Artificial Sequence: Synthetic oligonucleotide
  misc_feature 1..20: note = Target: ANGPTL4; (-) strand; PAM type: YTN; PAM sequence: TTT
  source 1..20: mol_type = other DNA
tatttcatatttatttattt

SEQ ID NO: 15850 - DNA, 20 bp, synthetic construct
  misc_feature 1..20: note = Description of Artificial Sequence: Synthetic oligonucleotide
  misc_feature 1..20: note = Target: ANGPTL4; (-) strand; PAM type: YTN; PAM sequence: TTA
  source 1..20: mol_type = other DNA
ttttatttcatatttattta

SEQ ID NO: 15851 - DNA, 20 bp, synthetic construct
  misc_feature 1..20: note = Description of Artificial Sequence: Synthetic oligonucleotide
  misc_feature 1..20: note = Target: ANGPTL4; (-) strand; PAM type: YTN; PAM sequence: TTT
  source 1..20: mol_type = other DNA
attttatttcatatttattt

SEQ ID NO: 15852 - DNA, 20 bp, synthetic construct
  misc_feature 1..20: note = Description of Artificial Sequence: Synthetic oligonucleotide
  misc_feature 1..20: note = Target: ANGPTL4; (-) strand; PAM type: YTN; PAM sequence: TTT
  source 1..20: mol_type = other DNA
tattttatttcatatttatt

SEQ ID NO: 15853 - DNA, 20 bp, synthetic construct
  misc_feature 1..20: note = Description of Artificial Sequence: Synthetic oligonucleotide
  misc_feature 1..20: note = Target: ANGPTL4; (-) strand; PAM type: YTN; PAM sequence: TTT
  source 1..20: mol_type = other DNA
ttattttatttcatatttat

SEQ ID NO: 15854 - DNA, 20 bp, synthetic construct
  misc_feature 1..20: note = Description of Artificial Sequence: Synthetic oligonucleotide
  misc_feature 1..20: note = Target: ANGPTL4; (-) strand; PAM type: YTN; PAM sequence: TTA
  source 1..20: mol_type = other DNA
caatttttattttatttcat

SEQ ID NO: 15855 - DNA, 20 bp, synthetic construct
  misc_feature 1..20: note = Description of Artificial Sequence: Synthetic oligonucleotide
  misc_feature 1..20: note = Target: ANGPTL4; (-) strand; PAM type: YTN; PAM sequence: TTA
  source 1..20: mol_type = other DNA
ttacaatttttattttattt

SEQ ID NO: 15856 - DNA, 20 bp, synthetic construct
  misc_feature 1..20: note = Description of Artificial Sequence: Synthetic oligonucleotide
  misc_feature 1..20: note = Target: ANGPTL4; (-) strand; PAM type: YTN; PAM sequence: CTA
  source 1..20: mol_type = other DNA
gatgtagggtatccaattat

SEQ ID NO: 15857 - DNA, 20 bp, synthetic construct
  misc_feature 1..20: note = Description of Artificial Sequence: Synthetic oligonucleotide
  misc_feature 1..20: note = Target: ANGPTL4; (-) strand; PAM type: YTN; PAM sequence: CTC
  source 1..20: mol_type = other DNA
aaatacatgtcctagatgta

SEQ ID NO: 15858 - DNA, 20 bp, synthetic construct
  misc_feature 1..20: note = Description of Artificial Sequence: Synthetic oligonucleotide
  misc_feature 1..20: note = Target: ANGPTL4; (-) strand; PAM type: YTN; PAM sequence: TTC
  source 1..20: mol_type = other DNA
ctcaaatacatgtcctagat

SEQ ID NO: 15859 - DNA, 20 bp, synthetic construct
  misc_feature 1..20: note = Description of Artificial Sequence: Synthetic oligonucleotide
  misc_feature 1..20: note = Target: ANGPTL4; (-) strand; PAM type: YTN; PAM sequence: TTT
  source 1..20: mol_type = other DNA
cctcaaatacatgtcctaga

SEQ ID NO: 15860 - DNA, 20 bp, synthetic construct
  misc_feature 1..20: note = Description of Artificial Sequence: Synthetic oligonucleotide
  misc_feature 1..20: note = Target: ANGPTL4; (-) strand; PAM type: YTN; PAM sequence: TTT
  source 1..20: mol_type = other DNA
tcctcaaatacatgtcctag

SEQ ID NO: 15861 - DNA, 20 bp, synthetic construct
  misc_feature 1..20: note = Description of Artificial Sequence: Synthetic oligonucleotide
  misc_feature 1..20: note = Target: ANGPTL4; (-) strand; PAM type: YTN; PAM sequence: TTC
  source 1..20: mol_type = other DNA
agaaaatggacagatgtggt

SEQ ID NO: 15862 - DNA, 20 bp, synthetic construct
  misc_feature 1..20: note = Description of Artificial Sequence: Synthetic oligonucleotide
  misc_feature 1..20: note = Target: ANGPTL4; (-) strand; PAM type: YTN; PAM sequence: CTG
  source 1..20: mol_type = other DNA
gggttcagaaaatggacaga

SEQ ID NO: 15863 - DNA, 20 bp, synthetic construct
  misc_feature 1..20: note = Description of Artificial Sequence: Synthetic oligonucleotide
  misc_feature 1..20: note = Target: ANGPTL4; (-) strand; PAM type: YTN; PAM sequence: TTA
  source 1..20: mol_type = other DNA
acagcagctggggttcagaa

SEQ ID NO: 15864 - DNA, 20 bp, synthetic construct
  misc_feature 1..20: note = Description of Artificial Sequence: Synthetic oligonucleotide
  misc_feature 1..20: note = Target: ANGPTL4; (-) strand; PAM type: YTN; PAM sequence: CTC
  source 1..20: mol_type = other DNA
ggaaaaaaaaaaaaaaaaaa

SEQ ID NO: 15865 - DNA, 20 bp, synthetic construct
  misc_feature 1..20: note = Description of Artificial Sequence: Synthetic oligonucleotide
  misc_feature 1..20: note = Target: ANGPTL4; (-) strand; PAM type: YTN; PAM sequence: TTG
  source 1..20: mol_type = other DNA
tctcggaaaaaaaaaaaaaa

SEQ ID NO: 15866 - DNA, 20 bp, synthetic construct
  misc_feature 1..20: note = Description of Artificial Sequence: Synthetic oligonucleotide
  misc_feature 1..20: note = Target: ANGPTL4; (-) strand; PAM type: YTN; PAM sequence: CTT
  source 1..20: mol_type = other DNA
gtctcggaaaaaaaaaaaaa

SEQ ID NO: 15867 - DNA, 20 bp, synthetic construct
  misc_feature 1..20: note = Description of Artificial Sequence: Synthetic oligonucleotide
  misc_feature 1..20: note = Target: ANGPTL4; (-) strand; PAM type: YTN; PAM sequence: CTC
  source 1..20: mol_type = other DNA
ttgtctcggaaaaaaaaaaa

SEQ ID NO: 15868 - DNA, 20 bp, synthetic construct
  misc_feature 1..20: note = Description of Artificial Sequence: Synthetic oligonucleotide
  misc_feature 1..20: note = Target: ANGPTL4; (-) strand; PAM type: YTN; PAM sequence: CTG
  source 1..20: mol_type = other DNA
ggtgacagagtgagactctt

SEQ ID NO: 15869 - DNA, 20 bp, synthetic construct
  misc_feature 1..20: note = Description of Artificial Sequence: Synthetic oligonucleotide
  misc_feature 1..20: note = Target: ANGPTL4; (-) strand; PAM type: YTN; PAM sequence: CTC
  source 1..20: mol_type = other DNA
cagcctgggtgacagagtga

SEQ ID NO: 15870 - DNA, 20 bp, synthetic construct
  misc_feature 1..20: note = Description of Artificial Sequence: Synthetic oligonucleotide
  misc_feature 1..20: note = Target: ANGPTL4; (-) strand; PAM type: YTN; PAM sequence: CTA
  source 1..20: mol_type = other DNA
ccgcgctccagcctgggtga

SEQ ID NO: 15871 - DNA, 20 bp, synthetic construct
  misc_feature 1..20: note = Description of Artificial Sequence: Synthetic oligonucleotide
  misc_feature 1..20: note = Target: ANGPTL4; (-) strand; PAM type: YTN; PAM sequence: CTG
  source 1..20: mol_type = other DNA
agatcgcactaccgcgctcc

SEQ ID NO: 15872 - DNA, 20 bp, synthetic construct
  misc_feature 1..20: note = Description of Artificial Sequence: Synthetic oligonucleotide
  misc_feature 1..20: note = Target: ANGPTL4; (-) strand; PAM type: YTN; PAM sequence: TTG
  source 1..20: mol_type = other DNA
cagtaagctgagatcgcact

SEQ ID NO: 15873 - DNA, 20 bp, synthetic construct
  misc_feature 1..20: note = Description of Artificial Sequence: Synthetic oligonucleotide
  misc_feature 1..20: note = Target: ANGPTL4; (-) strand; PAM type: YTN; PAM sequence: TTG
  source 1..20: mol_type = other DNA
aacccgggaggtggaggttg

SEQ ID NO: 15874 - DNA, 20 bp, synthetic construct
  misc_feature 1..20: note = Description of Artificial Sequence: Synthetic oligonucleotide
  misc_feature 1..20: note = Target: ANGPTL4; (-) strand; PAM type: YTN; PAM sequence: CTT
  source 1..20: mol_type = other DNA
gaacccgggaggtggaggtt

SEQ ID NO: 15875 - DNA, 20 bp, synthetic construct
  misc_feature 1..20: note = Description of Artificial Sequence: Synthetic oligonucleotide
  misc_feature 1..20: note = Target: ANGPTL4; (-) strand; PAM type: YTN; PAM sequence: CTC
  source 1..20: mol_type = other DNA
gggaggccgaggcaggagaa

SEQ ID NO: 15876 - DNA, 20 bp, synthetic construct
  misc_feature 1..20: note = Description of Artificial Sequence: Synthetic oligonucleotide
  misc_feature 1..20: note = Target: ANGPTL4; (-) strand; PAM type: YTN; PAM sequence: CTA
  source 1..20: mol_type = other DNA
ctcgggaggccgaggcagga

SEQ ID NO: 15877 - DNA, 20 bp, synthetic construct
  misc_feature 1..20: note = Description of Artificial Sequence: Synthetic oligonucleotide
  misc_feature 1..20: note = Target: ANGPTL4; (-) strand; PAM type: YTN; PAM sequence: CTC
  source 1..20: mol_type = other DNA
agctactcgggaggccgagg

SEQ ID NO: 15878 - DNA, 20 bp, synthetic construct
  misc_feature 1..20: note = Description of Artificial Sequence: Synthetic oligonucleotide
  misc_feature 1..20: note = Target: ANGPTL4; (-) strand; PAM type: YTN; PAM sequence: CTG
  source 1..20: mol_type = other DNA
taatctcagctactcgggag

SEQ ID NO: 15879 - DNA, 20 bp, synthetic construct
  misc_feature 1..20: note = Description of Artificial Sequence: Synthetic oligonucleotide
  misc_feature 1..20: note = Target: ANGPTL4; (-) strand; PAM type: YTN; PAM sequence: CTG
  source 1..20: mol_type = other DNA
ggtgcagtgggaggcgcctg

SEQ ID NO: 15880 - DNA, 20 bp, synthetic construct
  misc_feature 1..20: note = Description of Artificial Sequence: Synthetic oligonucleotide
  misc_feature 1..20: note = Target: ANGPTL4; (-) strand; PAM type: YTN; PAM sequence: TTA
  source 1..20: mol_type = other DNA
gctgggtgcagtgggaggcg

SEQ ID NO: 15881 - DNA, 20 bp, synthetic construct
  misc_feature 1..20: note = Description of Artificial Sequence: Synthetic oligonucleotide
  misc_feature 1..20: note = Target: ANGPTL4; (-) strand; PAM type: YTN; PAM sequence: CTA
  source 1..20: mol_type = other DNA
aaaatacaaaaattagctgg

SEQ ID NO: 15882 - DNA, 20 bp, synthetic construct
  misc_feature 1..20: note = Description of Artificial Sequence: Synthetic oligonucleotide
  misc_feature 1..20: note = Target: ANGPTL4; (-) strand; PAM type: YTN; PAM sequence: CTA
  source 1..20: mol_type = other DNA
tactaaaaatacaaaaatta

SEQ ID NO: 15883 - DNA, 20 bp, synthetic construct
  misc_feature 1..20: note = Description of Artificial Sequence: Synthetic oligonucleotide
  misc_feature 1..20: note = Target: ANGPTL4; (-) strand; PAM type: YTN; PAM sequence: CTG
  source 1..20: mol_type = other DNA
gccaaacccatctatactaa

SEQ ID NO: 15884 - DNA, 20 bp, synthetic construct
  misc_feature 1..20: note = Description of Artificial Sequence: Synthetic oligonucleotide
  misc_feature 1..20: note = Target: ANGPTL4; (-) strand; PAM type: YTN; PAM sequence: TTG
  source 1..20: mol_type = other DNA
agaccagcctggccaaaccc

SEQ ID NO: 15885 - DNA, 20 bp, synthetic construct
  misc_feature 1..20: note = Description of Artificial Sequence: Synthetic oligonucleotide
  misc_feature 1..20: note = Target: ANGPTL4; (-) strand; PAM type: YTN; PAM sequence: TTT
  source 1..20: mol_type = other DNA
gagaccagcctggccaaacc

SEQ ID NO: 15886 - DNA, 20 bp, synthetic construct
  misc_feature 1..20: note = Description of Artificial Sequence: Synthetic oligonucleotide
  misc_feature 1..20: note = Target: ANGPTL4; (-) strand; PAM type: YTN; PAM sequence: TTG
  source 1..20: mol_type = other DNA
aggtcaggagtttgagacca

SEQ ID NO: 15887 - DNA, 20 bp, synthetic construct
  misc_feature 1..20: note = Description of Artificial Sequence: Synthetic oligonucleotide
  misc_feature 1..20: note = Target: ANGPTL4; (-) strand; PAM type: YTN; PAM sequence: CTT
  source 1..20: mol_type = other DNA
gaggtcaggagtttgagacc

SEQ ID NO: 15888 - DNA, 20 bp, synthetic construct
  misc_feature 1..20: note = Description of Artificial Sequence: Synthetic oligonucleotide
  misc_feature 1..20: note = Target: ANGPTL4; (-) strand; PAM type: YTN; PAM sequence: TTC
  source 1..20: mol_type = other DNA
ggaggccgaggcgggcagat

SEQ ID NO: 15889 - DNA, 20 bp, synthetic construct
  misc_feature 1..20: note = Description of Artificial Sequence: Synthetic oligonucleotide
  misc_feature 1..20: note = Target: ANGPTL4; (-) strand; PAM type: YTN; PAM sequence: TTT
  source 1..20: mol_type = other DNA
cggaggccgaggcgggcaga

SEQ ID NO: 15890 - DNA, 20 bp, synthetic construct
  misc_feature 1..20: note = Description of Artificial Sequence: Synthetic oligonucleotide
  misc_feature 1..20: note = Target: ANGPTL4; (-) strand; PAM type: YTN; PAM sequence: CTG
  source 1..20: mol_type = other DNA
taatcccaccagtttcggag

SEQ ID NO: 15891 - DNA, 20 bp, synthetic construct
  misc_feature 1..20: note = Description of Artificial Sequence: Synthetic oligonucleotide
  misc_feature 1..20: note = Target: ANGPTL4; (-) strand; PAM type: YTN; PAM sequence: TTG
  source 1..20: mol_type = other DNA
cgcctgtaatcccaccagtt

SEQ ID NO: 15892 - DNA, 20 bp, synthetic construct
  misc_feature 1..20: note = Description of Artificial Sequence: Synthetic oligonucleotide
  misc_feature 1..20: note = Target: ANGPTL4; (-) strand; PAM type: YTN; PAM sequence: CTT
  source 1..20: mol_type = other DNA
gcgcctgtaatcccaccagt

SEQ ID NO: 15893 - DNA, 20 bp, synthetic construct
  misc_feature 1..20: note = Description of Artificial Sequence: Synthetic oligonucleotide
  misc_feature 1..20: note = Target: ANGPTL4; (-) strand; PAM type: YTN; PAM sequence: TTA
  source 1..20: mol_type = other DNA
acaggccgggcacagtggct

SEQ ID NO: 15894 - DNA, 20 bp, synthetic construct
  misc_feature 1..20: note = Description of Artificial Sequence: Synthetic oligonucleotide
  misc_feature 1..20: note = Target: ANGPTL4; (-) strand; PAM type: YTN; PAM sequence: CTG
  source 1..20: mol_type = other DNA
gggcaaaaataaattaacag

SEQ ID NO: 15895 - DNA, 20 bp, synthetic construct
  misc_feature 1..20: note = Description of Artificial Sequence: Synthetic oligonucleotide
  misc_feature 1..20: note = Target: ANGPTL4; (-) strand; PAM type: YTN; PAM sequence: TTG
  source 1..20: mol_type = other DNA
gagggagatactggggcaaa

SEQ ID NO: 15896 - DNA, 20 bp, synthetic construct
  misc_feature 1..20: note = Description of Artificial Sequence: Synthetic oligonucleotide
  misc_feature 1..20: note = Target: ANGPTL4; (-) strand; PAM type: YTN; PAM sequence: TTT
  source 1..20: mol_type = other DNA
ggagggagatactggggcaa

SEQ ID NO: 15897 - DNA, 20 bp, synthetic construct
  misc_feature 1..20: note = Description of Artificial Sequence: Synthetic oligonucleotide
  misc_feature 1..20: note = Target: ANGPTL4; (-) strand; PAM type: YTN; PAM sequence: CTA
  source 1..20: mol_type = other DNA
taaggaatatttggagggag

SEQ ID NO: 15898 - DNA, 20 bp, synthetic construct
  misc_feature 1..20: note = Description of Artificial Sequence: Synthetic oligonucleotide
  misc_feature 1..20: note = Target: ANGPTL4; (-) strand; PAM type: YTN; PAM sequence: CTC
  source 1..20: mol_type = other DNA
cccaagagacatctataagg

SEQ ID NO: 15899 - DNA, 20 bp, synthetic construct
  misc_feature 1..20: note = Description of Artificial Sequence: Synthetic oligonucleotide
  misc_feature 1..20: note = Target: ANGPTL4; (-) strand; PAM type: YTN; PAM sequence: CTA
  source 1..20: mol_type = other DNA
gcgcaagaacccccaccacc

SEQ ID NO: 15900 - DNA, 20 bp, synthetic construct
  misc_feature 1..20: note = Description of Artificial Sequence: Synthetic oligonucleotide
  misc_feature 1..20: note = Target: ANGPTL4; (-) strand; PAM type: YTN; PAM sequence: TTC
  source 1..20: mol_type = other DNA
tagcgcaagaacccccacca

SEQ ID NO: 15901 - DNA, 20 bp, synthetic construct
  misc_feature 1..20: note = Description of Artificial Sequence: Synthetic oligonucleotide
  misc_feature 1..20: note = Target: ANGPTL4; (-) strand; PAM type: YTN; PAM sequence: CTT
  source 1..20: mol_type = other DNA
ctagcgcaagaacccccacc

SEQ ID NO: 15902 - DNA, 20 bp, synthetic construct
  misc_feature 1..20: note = Description of Artificial Sequence: Synthetic oligonucleotide
  misc_feature 1..20: note = Target: ANGPTL4; (-) strand; PAM type: YTN; PAM sequence: TTC
  source 1..20: mol_type = other DNA
ttctagcgcaagaaccccca

SEQ ID NO: 15903 - DNA, 20 bp, synthetic construct
  misc_feature 1..20: note = Description of Artificial Sequence: Synthetic oligonucleotide
  misc_feature 1..20: note = Target: ANGPTL4; (-) strand; PAM type: YTN; PAM sequence: TTT
  source 1..20: mol_type = other DNA
cttctagcgcaagaaccccc

SEQ ID NO: 15904 - DNA, 20 bp, synthetic construct
  misc_feature 1..20: note = Description of Artificial Sequence: Synthetic oligonucleotide
  misc_feature 1..20: note = Target: ANGPTL4; (-) strand; PAM type: YTN; PAM sequence: TTT
  source 1..20: mol_type = other DNA
tcttctagcgcaagaacccc

SEQ ID NO: 15905 - DNA, 20 bp, synthetic construct
  misc_feature 1..20: note = Description of Artificial Sequence: Synthetic oligonucleotide
  misc_feature 1..20: note = Target: ANGPTL4; (-) strand; PAM type: YTN; PAM sequence: TTT
  source 1..20: mol_type = other DNA
ttcttctagcgcaagaaccc

SEQ ID NO: 15906 - DNA, 20 bp, synthetic construct
  misc_feature 1..20: note = Description of Artificial Sequence: Synthetic oligonucleotide
  misc_feature 1..20: note = Target: ANGPTL4; (-) strand; PAM type: YTN; PAM sequence: TTT
  source 1..20: mol_type = other DNA
tttcttctagcgcaagaacc

SEQ ID NO: 15907 - DNA, 20 bp, synthetic construct
  misc_feature 1..20: note = Description of Artificial Sequence: Synthetic oligonucleotide
  misc_feature 1..20: note = Target: ANGPTL4; (-) strand; PAM type: YTN; PAM sequence: CTG
  source 1..20: mol_type = other DNA
ccaggaagggtcaagacaag

SEQ ID NO: 15908 - DNA, 20 bp, synthetic construct
  misc_feature 1..20: note = Description of Artificial Sequence: Synthetic oligonucleotide
  misc_feature 1..20: note = Target: ANGPTL4; (-) strand; PAM type: YTN; PAM sequence: CTG
  source 1..20: mol_type = other DNA
tgtccccagcacctgccagg

SEQ ID NO: 15909 - DNA, 20 bp, synthetic construct
  misc_feature 1..20: note = Description of Artificial Sequence: Synthetic oligonucleotide
  misc_feature 1..20: note = Target: ANGPTL4; (-) strand; PAM type: YTN; PAM sequence: CTA
  source 1..20: mol_type = other DNA
tacccagccacagccccagg

SEQ ID NO: 15910 - DNA, 20 bp, synthetic construct
  misc_feature 1..20: note = Description of Artificial Sequence: Synthetic oligonucleotide
  misc_feature 1..20: note = Target: ANGPTL4; (-) strand; PAM type: YTN; PAM sequence: TTG
  source 1..20: mol_type = other DNA
tcacctatacccagccacag

SEQ ID NO: 15911 - DNA, 20 bp, synthetic construct
  misc_feature 1..20: note = Description of Artificial Sequence: Synthetic oligonucleotide
  misc_feature 1..20: note = Target: ANGPTL4; (-) strand; PAM type: YTN; PAM sequence: TTT
  source 1..20: mol_type = other DNA
gtcacctatacccagccaca

SEQ ID NO: 15912 - DNA, 20 bp, synthetic construct
  misc_feature 1..20: note = Description of Artificial Sequence: Synthetic oligonucleotide
  misc_feature 1..20: note = Target: ANGPTL4; (-) strand; PAM type: YTN; PAM sequence: CTA
  source 1..20: mol_type = other DNA
aaaagtttgtcacctatacc

SEQ ID NO: 15913 - DNA, 20 bp, synthetic construct
  misc_feature 1..20: note = Description of Artificial Sequence: Synthetic oligonucleotide
  misc_feature 1..20: note = Target: ANGPTL4; (-) strand; PAM type: YTN; PAM sequence: CTA
  source 1..20: mol_type = other DNA
caaagctaaaaagtttgtca

SEQ ID NO: 15914 - DNA, 20 bp, synthetic construct
  misc_feature 1..20: note = Description of Artificial Sequence: Synthetic oligonucleotide
  misc_feature 1..20: note = Target: ANGPTL4; (-) strand; PAM type: YTN; PAM sequence: CTC
  source 1..20: mol_type = other DNA
tacaaagctaaaaagtttgt

SEQ ID NO: 15915 - DNA, 20 bp, synthetic construct
  misc_feature 1..20: note = Description of Artificial Sequence: Synthetic oligonucleotide
  misc_feature 1..20: note = Target: ANGPTL4; (-) strand; PAM type: YTN; PAM sequence: CTA
  source 1..20: mol_type = other DNA
cctctacaaagctaaaaagt

SEQ ID NO: 15916 - DNA, 20 bp, synthetic construct
  misc_feature 1..20: note = Description of Artificial Sequence: Synthetic oligonucleotide
  misc_feature 1..20: note = Target: ANGPTL4; (-) strand; PAM type: YTN; PAM sequence: CTG
  source 1..20: mol_type = other DNA
taggacctacctctacaaag

SEQ ID NO: 15917 - DNA, 20 bp, synthetic construct
  misc_feature 1..20: note = Description of Artificial Sequence: Synthetic oligonucleotide
  misc_feature 1..20: note = Target: ANGPTL4; (-) strand; PAM type: YTN; PAM sequence: CTG
  source 1..20: mol_type = other DNA
gcagctgtaggacctacctc

SEQ ID NO: 15918 - DNA, 20 bp, synthetic construct
  misc_feature 1..20: note = Description of Artificial Sequence: Synthetic oligonucleotide
  misc_feature 1..20: note = Target: ANGPTL4; (-) strand; PAM type: YTN; PAM sequence: CTG
  source 1..20: mol_type = other DNA
gcctggcagctgtaggacct

SEQ ID NO: 15919 - DNA, 20 bp, synthetic construct
  misc_feature 1..20: note = Description of Artificial Sequence: Synthetic oligonucleotide
  misc_feature 1..20: note = Target: ANGPTL4; (-) strand; PAM type: YTN; PAM sequence: CTC
  source 1..20: mol_type = other DNA
cctggcctggcagctgtagg

SEQ ID NO: 15920 - DNA, 20 bp, synthetic construct
  misc_feature 1..20: note = Description of Artificial Sequence: Synthetic oligonucleotide
  misc_feature 1..20: note = Target: ANGPTL4; (-) strand; PAM type: YTN; PAM sequence: CTA
  source 1..20: mol_type = other DNA
gcctccctggcctggcagct

SEQ ID NO: 15921 - DNA, 20 bp, synthetic construct
  misc_feature 1..20: note = Description of Artificial Sequence: Synthetic oligonucleotide
  misc_feature 1..20: note = Target: ANGPTL4; (-) strand; PAM type: YTN; PAM sequence: CTC
  source 1..20: mol_type = other DNA
tagcctccctggcctggcag

SEQ ID NO: 15922 - DNA, 20 bp, synthetic construct
  misc_feature 1..20: note = Description of Artificial Sequence: Synthetic oligonucleotide
  misc_feature 1..20: note = Target: ANGPTL4; (-) strand; PAM type: YTN; PAM sequence: CTG
  source 1..20: mol_type = other DNA
gagagggcagcctctagcct

SEQ ID NO: 15923 - DNA, 20 bp, synthetic construct
  misc_feature 1..20: note = Description of Artificial Sequence: Synthetic oligonucleotide
  misc_feature 1..20: note = Target: ANGPTL4; (-) strand; PAM type: YTN; PAM sequence: CTC
  source 1..20: mol_type = other DNA
agtacaggacacaggcaaac

SEQ ID NO: 15924 - DNA, 20 bp, synthetic construct
  misc_feature 1..20: note = Description of Artificial Sequence: Synthetic oligonucleotide
  misc_feature 1..20: note = Target: ANGPTL4; (-) strand; PAM type: YTN; PAM sequence: CTG
  source 1..20: mol_type = other DNA
ctcagtacaggacacaggca

SEQ ID NO: 15925 - DNA, 20 bp, synthetic construct
  misc_feature 1..20: note = Description of Artificial Sequence: Synthetic oligonucleotide
  misc_feature 1..20: note = Target: ANGPTL4; (-) strand; PAM type: YTN; PAM sequence: CTA
  source 1..20: mol_type = other DNA
agcctgctcagtacaggaca

SEQ ID NO: 15926 - DNA, 20 bp, synthetic construct
  misc_feature 1..20: note = Description of Artificial Sequence: Synthetic oligonucleotide
  misc_feature 1..20: note = Target: ANGPTL4; (-) strand; PAM type: YTN; PAM sequence: CTC
  source 1..20: mol_type = other DNA
taagcctgctcagtacagga

SEQ ID NO: 15927 - DNA, 20 bp, synthetic construct
  misc_feature 1..20: note = Description of Artificial Sequence: Synthetic oligonucleotide
  misc_feature 1..20: note = Target: ANGPTL4; (-) strand; PAM type: YTN; PAM sequence: CTC
  source 1..20: mol_type = other DNA
agaggagatcctctaagcct

SEQ ID NO: 15928 - DNA, 20 bp, synthetic construct
  misc_feature 1..20: note = Description of Artificial Sequence: Synthetic oligonucleotide
  misc_feature 1..20: note = Target: ANGPTL4; (-) strand; PAM type: YTN; PAM sequence: CTC
  source 1..20: mol_type = other DNA
cagtgacagtgggctcagag

SEQ ID NO: 15929 - DNA, 20 bp, synthetic construct
  misc_feature 1..20: note = Description of Artificial Sequence: Synthetic oligonucleotide
  misc_feature 1..20: note = Target: ANGPTL4; (-) strand; PAM type: YTN; PAM sequence: CTC
  source 1..20: mol_type = other DNA
accaccagctccagtgacag

SEQ ID NO: 15930 - DNA, 20 bp, synthetic construct
  misc_feature 1..20: note = Description of Artificial Sequence: Synthetic oligonucleotide
  misc_feature 1..20: note = Target: ANGPTL4; (-) strand; PAM type: YTN; PAM sequence: CTG
  source 1..20: mol_type = other DNA
gactcaccaccagctccagt

SEQ ID NO: 15931 - DNA, 20 bp, synthetic construct
  misc_feature 1..20: note = Description of Artificial Sequence: Synthetic oligonucleotide
  misc_feature 1..20: note = Target: ANGPTL4; (-) strand; PAM type: YTN; PAM sequence: CTG
  source 1..20: mol_type = other DNA
cagactggactcaccaccag

SEQ ID NO: 15932 - DNA, 20 bp, synthetic construct
  misc_feature 1..20: note = Description of Artificial Sequence: Synthetic oligonucleotide
  misc_feature 1..20: note = Target: ANGPTL4; (-) strand; PAM type: YTN; PAM sequence: CTC
  source 1..20: mol_type = other DNA
ctgcagactggactcaccac

SEQ ID NO: 15933 - DNA, 20 bp, synthetic construct
  misc_feature 1..20: note = Description of Artificial Sequence: Synthetic oligonucleotide
  misc_feature 1..20: note = Target: ANGPTL4; (-) strand; PAM type: YTN; PAM sequence: CTC
  source 1..20: mol_type = other DNA
tcctgcagactggactcacc

SEQ ID NO: 15934 - DNA, 20 bp, synthetic construct
  misc_feature 1..20: note = Description of Artificial Sequence: Synthetic oligonucleotide
  misc_feature 1..20: note = Target: ANGPTL4; (-) strand; PAM type: YTN; PAM sequence: CTA
  source 1..20: mol_type = other DNA
gaggaaccccctctcctgca

SEQ ID NO: 15935 - DNA, 20 bp, synthetic construct
  misc_feature 1..20: note = Description of Artificial Sequence: Synthetic oligonucleotide
  misc_feature 1..20: note = Target: ANGPTL4; (-) strand; PAM type: YTN; PAM sequence: CTG
  source 1..20: mol_type = other DNA
gaaatgaagagggtgtggct

SEQ ID NO: 15936 - DNA, 20 bp, synthetic construct
  misc_feature 1..20: note = Description of Artificial Sequence: Synthetic oligonucleotide
  misc_feature 1..20: note = Target: ANGPTL4; (-) strand; PAM type: YTN; PAM sequence: TTG
  source 1..20: mol_type = other DNA
gcagagcctggaaatgaaga

SEQ ID NO: 15937 - DNA, 20 bp, synthetic construct
  misc_feature 1..20: note = Description of Artificial Sequence: Synthetic oligonucleotide
  misc_feature 1..20: note = Target: ANGPTL4; (-) strand; PAM type: YTN; PAM sequence: TTG
  source 1..20: mol_type = other DNA
aagagatgagcccatcattg

SEQ ID NO: 15938 - DNA, 20 bp, synthetic construct
  misc_feature 1..20: note = Description of Artificial Sequence: Synthetic oligonucleotide
  misc_feature 1..20: note = Target: ANGPTL4; (-) strand; PAM type: YTN; PAM sequence: CTG
  source 1..20: mol_type = other DNA
caggaaaaaggatgacattg

SEQ ID NO: 15939 - DNA, 20 bp, synthetic construct
  misc_feature 1..20: note = Description of Artificial Sequence: Synthetic oligonucleotide
  misc_feature 1..20: note = Target: ANGPTL4; (-) strand; PAM type: YTN; PAM sequence: TTG
  source 1..20: mol_type = other DNA
aggtcaaggtggctgcagga

SEQ ID NO: 15940 - DNA, 20 bp, synthetic construct
  misc_feature 1..20: note = Description of Artificial Sequence: Synthetic oligonucleotide
  misc_feature 1..20: note = Target: ANGPTL4; (-) strand; PAM type: YTN; PAM sequence: TTT
  source 1..20: mol_type = other DNA
gaggtcaaggtggctgcagg

SEQ ID NO: 15941 - DNA, 20 bp, synthetic construct
  misc_feature 1..20: note = Description of Artificial Sequence: Synthetic oligonucleotide
  misc_feature 1..20: note = Target: ANGPTL4; (-) strand; PAM type: YTN; PAM sequence: CTT
  source 1..20: mol_type = other DNA
tgaggtcaaggtggctgcag

SEQ ID NO: 15942 - DNA, 20 bp, synthetic construct
  misc_feature 1..20: note = Description of Artificial Sequence: Synthetic oligonucleotide
  misc_feature 1..20: note = Target: ANGPTL4; (-) strand; PAM type: YTN; PAM sequence: TTG
  source 1..20: mol_type = other DNA
gaggggcaggaaatgctttg

SEQ ID NO: 15943 - DNA, 20 bp, synthetic construct
  misc_feature 1..20: note = Description of Artificial Sequence: Synthetic oligonucleotide
  misc_feature 1..20: note = Target: ANGPTL4; (-) strand; PAM type: YTN; PAM sequence: TTC
  source 1..20: mol_type = other DNA
cccaggttggaggggcagga

SEQ ID NO: 15944 - DNA, 20 bp, synthetic construct
  misc_feature 1..20: note = Description of Artificial Sequence: Synthetic oligonucleotide
  misc_feature 1..20: note = Target: ANGPTL4; (-) strand; PAM type: YTN; PAM sequence: CTG
  source 1..20: mol_type = other DNA
tcgttccccaggttggaggg

SEQ ID NO: 15945 - DNA, 20 bp, synthetic construct
  misc_feature 1..20: note = Description of Artificial Sequence: Synthetic oligonucleotide
  misc_feature 1..20: note = Target: ANGPTL4; (-) strand; PAM type: YTN; PAM sequence: TTC
  source 1..20: mol_type = other DNA
tgtcgttccccaggttggag

SEQ ID NO: 15946 - DNA, 20 bp, synthetic construct
  misc_feature 1..20: note = Description of Artificial Sequence: Synthetic oligonucleotide
  misc_feature 1..20: note = Target: ANGPTL4; (-) strand; PAM type: YTN; PAM sequence: TTT
  source 1..20: mol_type = other DNA
ctgtcgttccccaggttgga

SEQ ID NO: 15947 - DNA, 20 bp, synthetic construct
  misc_feature 1..20: note = Description of Artificial Sequence: Synthetic oligonucleotide
  misc_feature 1..20: note = Target: ANGPTL4; (-) strand; PAM type: YTN; PAM sequence: TTT
  source 1..20: mol_type = other DNA
tctgtcgttccccaggttgg

SEQ ID NO: 15948 - DNA, 20 bp, synthetic construct
  misc_feature 1..20: note = Description of Artificial Sequence: Synthetic oligonucleotide
  misc_feature 1..20: note = Target: ANGPTL4; (-) strand; PAM type: YTN; PAM sequence: TTT
  source 1..20: mol_type = other DNA
ttctgtcgttccccaggttg

SEQ ID NO: 15949 - DNA, 20 bp, synthetic construct
  misc_feature 1..20: note = Description of Artificial Sequence: Synthetic oligonucleotide
  misc_feature 1..20: note = Target: ANGPTL4; (-) strand; PAM type: YTN; PAM sequence: TTT
  source 1..20: mol_type = other DNA
tttctgtcgttccccaggtt

SEQ ID NO: 15950 - DNA, 20 bp, synthetic construct
  misc_feature 1..20: note = Description of Artificial Sequence: Synthetic oligonucleotide
  misc_feature 1..20: note = Target: ANGPTL4; (-) strand; PAM type: YTN; PAM sequence: TTT
  source 1..20: mol_type = other DNA
ttttctgtcgttccccaggt

SEQ ID NO: 15951 - DNA, 20 bp, synthetic construct
  misc_feature 1..20: note = Description of Artificial Sequence: Synthetic oligonucleotide
  misc_feature 1..20: note = Target: ANGPTL4; (-) strand; PAM type: YTN; PAM sequence: TTT
  source 1..20: mol_type = other DNA
tttttctgtcgttccccagg

SEQ ID NO: 15952 - DNA, 20 bp, synthetic construct
  misc_feature 1..20: note = Description of Artificial Sequence: Synthetic oligonucleotide
  misc_feature 1..20: note = Target: ANGPTL4; (-) strand; PAM type: YTN; PAM sequence: TTT
  source 1..20: mol_type = other DNA
ttttttctgtcgttccccag

SEQ ID NO: 15953 - DNA, 20 bp, synthetic construct
  misc_feature 1..20: note = Description of Artificial Sequence: Synthetic oligonucleotide
  misc_feature 1..20: note = Target: ANGPTL4; (-) strand; PAM type: YTN; PAM sequence: TTT
  source 1..20: mol_type = other DNA
tttttttctgtcgttcccca

SEQ ID NO: 15954 - DNA, 20 bp, synthetic construct
  misc_feature 1..20: note = Description of Artificial Sequence: Synthetic oligonucleotide
  misc_feature 1..20: note = Target: ANGPTL4; (-) strand; PAM type: YTN; PAM sequence: TTT
  source 1..20: mol_type = other DNA
ttttttttctgtcgttcccc

SEQ ID NO: 15955 - DNA, 20 bp, synthetic construct
  misc_feature 1..20: note = Description of Artificial Sequence: Synthetic oligonucleotide
  misc_feature 1..20: note = Target: ANGPTL4; (-) strand; PAM type: YTN; PAM sequence: TTT
  source 1..20: mol_type = other DNA
tttttttttctgtcgttccc

SEQ ID NO: 15956 - DNA, 20 bp, synthetic construct
  misc_feature 1..20: note = Description of Artificial Sequence: Synthetic oligonucleotide
  misc_feature 1..20: note = Target: ANGPTL4; (-) strand; PAM type: YTN; PAM sequence: TTT
  source 1..20: mol_type = other DNA
ttttttttttctgtcgttcc

SEQ ID NO: 15957 - DNA, 20 bp, synthetic construct
  misc_feature 1..20: note = Description of Artificial Sequence: Synthetic oligonucleotide
  misc_feature 1..20: note = Target: ANGPTL4; (-) strand; PAM type: YTN; PAM sequence: TTT
  source 1..20: mol_type = other DNA
tttttttttttctgtcgttc

SEQ ID NO: 15958 - DNA, 20 bp, synthetic construct
  misc_feature 1..20: note = Description of Artificial Sequence: Synthetic oligonucleotide
  misc_feature 1..20: note = Target: ANGPTL4; (-) strand; PAM type: YTN; PAM sequence: TTT
  source 1..20: mol_type = other DNA
ttttttttttttctgtcgtt

SEQ ID NO: 15959 - DNA, 20 bp, synthetic construct
  misc_feature 1..20: note = Description of Artificial Sequence: Synthetic oligonucleotide
  misc_feature 1..20: note = Target: ANGPTL4; (-) strand; PAM type: YTN; PAM sequence: TTT
  source 1..20: mol_type = other DNA
tttttttttttttctgtcgt

SEQ ID NO: 15960 - DNA, 20 bp, synthetic construct
  misc_feature 1..20: note = Description of Artificial Sequence: Synthetic oligonucleotide
  misc_feature 1..20: note = Target: ANGPTL4; (-) strand; PAM type: YTN; PAM sequence: TTT
  source 1..20: mol_type = other DNA
ttttttttttttttctgtcg

SEQ ID NO: 15961 - DNA, 20 bp, synthetic construct
  misc_feature 1..20: note = Description of Artificial Sequence: Synthetic oligonucleotide
  misc_feature 1..20: note = Target: ANGPTL4; (-) strand; PAM type: YTN; PAM sequence: CTC
  source 1..20: mol_type = other DNA
ccagagtgcggggagtgtag

SEQ ID NO: 15962 - DNA, 20 bp, synthetic construct
  misc_feature 1..20: note = Description of Artificial Sequence: Synthetic oligonucleotide
  misc_feature 1..20: note = Target: ANGPTL4; (-) strand; PAM type: YTN; PAM sequence: CTC
  source 1..20: mol_type = other DNA
agcctcccagagtgcgggga

SEQ ID NO: 15963 - DNA, 20 bp, synthetic construct
  misc_feature 1..20: note = Description of Artificial Sequence: Synthetic oligonucleotide
  misc_feature 1..20: note = Target: ANGPTL4; (-) strand; PAM type: YTN; PAM sequence: CTA
  source 1..20: mol_type = other DNA
cccacctcagcctcccagag

SEQ ID NO: 15964 - DNA, 20 bp, synthetic construct
  misc_feature 1..20: note = Description of Artificial Sequence: Synthetic oligonucleotide
  misc_feature 1..20: note = Target: ANGPTL4; (-) strand; PAM type: YTN; PAM sequence: TTG
  source 1..20: mol_type = other DNA
tgatctacccacctcagcct

SEQ ID NO: 15965 - DNA, 20 bp, synthetic construct
  misc_feature 1..20: note = Description of Artificial Sequence: Synthetic oligonucleotide
  misc_feature 1..20: note = Target: ANGPTL4; (-) strand; PAM type: YTN; PAM sequence: CTT
  source 1..20: mol_type = other DNA
gtgatctacccacctcagcc

SEQ ID NO: 15966 - DNA, 20 bp, synthetic construct
  misc_feature 1..20: note = Description of Artificial Sequence: Synthetic oligonucleotide
  misc_feature 1..20: note = Target: ANGPTL4; (-) strand; PAM type: YTN; PAM sequence: CTG
  source 1..20: mol_type = other DNA
accttgtgatctacccacct

SEQ ID NO: 15967 - DNA, 20 bp, synthetic construct
  misc_feature 1..20: note = Description of Artificial Sequence: Synthetic oligonucleotide
  misc_feature 1..20: note = Target: ANGPTL4; (-) strand; PAM type: YTN; PAM sequence: CTC
  source 1..20: mol_type = other DNA
ctgaccttgtgatctaccca

SEQ ID NO: 15968 - DNA, 20 bp, synthetic construct
  misc_feature 1..20: note = Description of Artificial Sequence: Synthetic oligonucleotide
  misc_feature 1..20: note = Target: ANGPTL4; (-) strand; PAM type: YTN; PAM sequence: TTG
  source 1..20: mol_type = other DNA
atctcctgaccttgtgatct

SEQ ID NO: 15969 - DNA, 20 bp, synthetic construct
  misc_feature 1..20: note = Description of Artificial Sequence: Synthetic oligonucleotide
  misc_feature 1..20: note = Target: ANGPTL4; (-) strand; PAM type: YTN; PAM sequence: CTT
  source 1..20: mol_type = other DNA
gatctcctgaccttgtgatc

SEQ ID NO: 15970 - DNA, 20 bp, synthetic construct
  misc_feature 1..20: note = Description of Artificial Sequence: Synthetic oligonucleotide
  misc_feature 1..20: note = Target: ANGPTL4; (-) strand; PAM type: YTN; PAM sequence: TTC
  source 1..20: mol_type = other DNA
accgtgtcagccagtatggt

SEQ ID NO: 15971 - DNA, 20 bp, synthetic construct
  misc_feature 1..20: note = Description of Artificial Sequence: Synthetic oligonucleotide
  misc_feature 1..20: note = Target: ANGPTL4; (-) strand; PAM type: YTN; PAM sequence: TTT
  source 1..20: mol_type = other DNA
caccgtgtcagccagtatgg

SEQ ID NO: 15972 - DNA, 20 bp, synthetic construct
  misc_feature 1..20: note = Description of Artificial Sequence: Synthetic oligonucleotide
  misc_feature 1..20: note = Target: ANGPTL4; (-) strand; PAM type: YTN; PAM sequence: TTA
  source 1..20: mol_type = other DNA
gtagagacggggtttcaccg

SEQ ID NO: 15973 - DNA, 20 bp, synthetic construct
  misc_feature 1..20: note = Description of Artificial Sequence: Synthetic oligonucleotide
  misc_feature 1..20: note = Target: ANGPTL4; (-) strand; PAM type: YTN; PAM sequence: TTT
  source 1..20: mol_type = other DNA
agtagagacggggtttcacc

SEQ ID NO: 15974 - DNA, 20 bp, synthetic construct
  misc_feature 1..20: note = Description of Artificial Sequence: Synthetic oligonucleotide
  misc_feature 1..20: note = Target: ANGPTL4; (-) strand; PAM type: YTN; PAM sequence: TTT
  source 1..20: mol_type = other DNA
tagtagagacggggtttcac

SEQ ID NO: 15975 - DNA, 20 bp, synthetic construct
  misc_feature 1..20: note = Description of Artificial Sequence: Synthetic oligonucleotide
  misc_feature 1..20: note = Target: ANGPTL4; (-) strand; PAM type: YTN; PAM sequence: TTT
  source 1..20: mol_type = other DNA
ttagtagagacggggtttca

SEQ ID NO: 15976 - DNA, 20 bp, synthetic construct
  misc_feature 1..20: note = Description of Artificial Sequence: Synthetic oligonucleotide
  misc_feature 1..20: note = Target: ANGPTL4; (-) strand; PAM type: YTN; PAM sequence: TTG
  source 1..20: mol_type = other DNA
tatttttagtagagacgggg

SEQ ID NO: 15977 - DNA, 20 bp, synthetic construct
  misc_feature 1..20: note = Description of Artificial Sequence: Synthetic oligonucleotide
  misc_feature 1..20: note = Target: ANGPTL4; (-) strand; PAM type: YTN; PAM sequence: TTT
  source 1..20: mol_type = other DNA
gtatttttagtagagacggg

SEQ ID NO: 15978 - DNA, 20 bp, synthetic construct
  misc_feature 1..20: note = Description of Artificial Sequence: Synthetic oligonucleotide
  misc_feature 1..20: note = Target: ANGPTL4; (-) strand; PAM type: YTN; PAM sequence: TTT
  source 1..20: mol_type = other DNA
tgtatttttagtagagacgg

SEQ ID NO: 15979 - DNA, 20 bp, synthetic construct
  misc_feature 1..20: note = Description of Artificial Sequence: Synthetic oligonucleotide
  misc_feature 1..20: note = Target: ANGPTL4; (-) strand; PAM type: YTN; PAM sequence: TTT
  source 1..20: mol_type = other DNA
ttgtatttttagtagagacg

SEQ ID NO: 15980 - DNA, 20 bp, synthetic construct
  misc_feature 1..20: note = Description of Artificial Sequence: Synthetic oligonucleotide
  misc_feature 1..20: note = Target: ANGPTL4; (-) strand; PAM type: YTN; PAM sequence: TTT
  source 1..20: mol_type = other DNA
tttgtatttttagtagagac

SEQ ID NO: 15981 - DNA, 20 bp, synthetic construct
  misc_feature 1..20: note = Description of Artificial Sequence: Synthetic oligonucleotide
  misc_feature 1..20: note = Target: ANGPTL4; (-) strand; PAM type: YTN; PAM sequence: CTA
  source 1..20: mol_type = other DNA
attttttgtatttttagtag

SEQ ID NO: 15982 - DNA, 20 bp, synthetic construct
  misc_feature 1..20: note = Description of Artificial Sequence: Synthetic oligonucleotide
  misc_feature 1..20: note = Target: ANGPTL4; (-) strand; PAM type: YTN; PAM sequence: CTG
  source 1..20: mol_type = other DNA
gctaattttttgtattttta

SEQ ID NO: 15983 - DNA, 20 bp, synthetic construct
  misc_feature 1..20: note = Description of Artificial Sequence: Synthetic oligonucleotide
  misc_feature 1..20: note = Target: ANGPTL4; (-) strand; PAM type: YTN; PAM sequence: CTA
  source 1..20: mol_type = other DNA
cgggcatgtgccaccatgcc

SEQ ID NO: 15984 - DNA, 20 bp, synthetic construct
  misc_feature 1..20: note = Description of Artificial Sequence: Synthetic oligonucleotide
  misc_feature 1..20: note = Target: ANGPTL4; (-) strand; PAM type: YTN; PAM sequence: CTG
  source 1..20: mol_type = other DNA
ggactacgggcatgtgccac

SEQ ID NO: 15985 - DNA, 20 bp, synthetic construct
  misc_feature 1..20: note = Description of Artificial Sequence: Synthetic oligonucleotide
  misc_feature 1..20: note = Target: ANGPTL4; (-) strand; PAM type: YTN; PAM sequence: CTC
  source 1..20: mol_type = other DNA
ccgaatagctgggactacgg

SEQ ID NO: 15986 - DNA, 20 bp, synthetic construct
  misc_feature 1..20: note = Description of Artificial Sequence: Synthetic oligonucleotide
  misc_feature 1..20: note = Target: ANGPTL4; (-) strand; PAM type: YTN; PAM sequence: TTA
  source 1..20: mol_type = other DNA
gcctcccgaatagctgggac

SEQ ID NO: 15987 - DNA, 20 bp, synthetic construct
  misc_feature 1..20: note = Description of Artificial Sequence: Synthetic oligonucleotide
  misc_feature 1..20: note = Target: ANGPTL4; (-) strand; PAM type: YTN; PAM sequence: CTT
  source 1..20: mol_type = other DNA
agcctcccgaatagctggga

SEQ ID NO: 15988 - DNA, 20 bp, synthetic construct
  misc_feature 1..20: note = Description of Artificial Sequence: Synthetic oligonucleotide
  misc_feature 1..20: note = Target: ANGPTL4; (-) strand; PAM type: YTN; PAM sequence: CTG
  source 1..20: mol_type = other DNA
ccttagcctcccgaatagct

SEQ ID NO: 15989 - DNA, 20 bp, synthetic construct
  misc_feature 1..20: note = Description of Artificial Sequence: Synthetic oligonucleotide
  misc_feature 1..20: note = Target: ANGPTL4; (-) strand; PAM type: YTN; PAM sequence: CTC
  source 1..20: mol_type = other DNA
ctgccttagcctcccgaata

SEQ ID NO: 15990 - DNA, 20 bp, synthetic construct
  misc_feature 1..20: note = Description of Artificial Sequence: Synthetic oligonucleotide
  misc_feature 1..20: note = Target: ANGPTL4; (-) strand; PAM type: YTN; PAM sequence: TTC
  source 1..20: mol_type = other DNA
tcctgccttagcctcccgaa

SEQ ID NO: 15991 - DNA, 20 bp, synthetic construct
  misc_feature 1..20: note = Description of Artificial Sequence: Synthetic oligonucleotide
  misc_feature 1..20: note = Target: ANGPTL4; (-) strand; PAM type: YTN; PAM sequence: TTC
  source 1..20: mol_type = other DNA
aagtgattctcctgccttag

SEQ ID NO: 15992 - DNA, 20 bp, synthetic construct
  misc_feature 1..20: note = Description of Artificial Sequence: Synthetic oligonucleotide
  misc_feature 1..20: note = Target: ANGPTL4; (-) strand; PAM type: YTN; PAM sequence: CTC
  source 1..20: mol_type = other DNA
ccaggttcaagtgattctcc

SEQ ID NO: 15993 - DNA, 20 bp, synthetic construct
  misc_feature 1..20: note = Description of Artificial Sequence: Synthetic oligonucleotide
  misc_feature 1..20: note = Target: ANGPTL4; (-) strand; PAM type: YTN; PAM sequence: CTC
  source 1..20: mol_type = other DNA
cgcctcccaggttcaagtga

SEQ ID NO: 15994 - DNA, 20 bp, synthetic construct
  misc_feature 1..20: note = Description of Artificial Sequence: Synthetic oligonucleotide
  misc_feature 1..20: note = Target: ANGPTL4; (-) strand; PAM type: YTN; PAM sequence: CTG
  source 1..20: mol_type = other DNA
caacctccgcctcccaggtt

SEQ ID NO: 15995 - DNA, 20 bp, synthetic construct
  misc_feature 1..20: note = Description of Artificial Sequence: Synthetic oligonucleotide
  misc_feature 1..20: note = Target: ANGPTL4; (-) strand; PAM type: YTN; PAM sequence: CTC
  source 1..20: mol_type = other DNA
actgcaacctccgcctccca

SEQ ID NO: 15996 - DNA, 20 bp, synthetic construct
  misc_feature 1..20: note = Description of Artificial Sequence: Synthetic oligonucleotide
  misc_feature 1..20: note = Target: ANGPTL4; (-) strand; PAM type: YTN; PAM sequence: CTC
  source 1..20: mol_type = other DNA
agctcactgcaacctccgcc

SEQ ID NO: 15997 - DNA, 20 bp, synthetic construct
  misc_feature 1..20: note = Description of Artificial Sequence: Synthetic oligonucleotide
  misc_feature 1..20: note = Target: ANGPTL4; (-) strand; PAM type: YTN; PAM sequence: CTG
  source 1..20: mol_type = other DNA
gagtgcagtggtgcaatctc

SEQ ID NO: 15998 - DNA, 20 bp, synthetic construct
  misc_feature 1..20: note = Description of Artificial Sequence: Synthetic oligonucleotide
  misc_feature 1..20: note = Target: ANGPTL4; (-) strand; PAM type: YTN; PAM sequence: CTG
  source 1..20: mol_type = other DNA
tcacccaggctggagtgcag

SEQ ID NO: 15999 - DNA, 20 bp, synthetic construct
  misc_feature 1..20: note = Description of Artificial Sequence: Synthetic oligonucleotide
  misc_feature 1..20: note = Target: ANGPTL4; (-) strand; PAM type: YTN; PAM sequence: CTC
  source 1..20: mol_type = other DNA
tgtcacccaggctggagtgc

SEQ ID NO: 16000 - DNA, 20 bp, synthetic construct
  misc_feature 1..20: note = Description of Artificial Sequence: Synthetic oligonucleotide
  misc_feature 1..20: note = Target: ANGPTL4; (-) strand; PAM type: YTN; PAM sequence: TTG
  source 1..20: mol_type = other DNA
ctctgtcacccaggctggag

SEQ ID NO: 16001 - DNA, 20 bp, synthetic construct
  misc_feature 1..20: note = Description of Artificial Sequence: Synthetic oligonucleotide
  misc_feature 1..20: note = Target: ANGPTL4; (-) strand; PAM type: YTN; PAM sequence: CTT
  source 1..20: mol_type = other DNA
gctctgtcacccaggctgga

SEQ ID NO: 16002 - DNA, 20 bp, synthetic construct
  misc_feature 1..20: note = Description of Artificial Sequence: Synthetic oligonucleotide
  misc_feature 1..20: note = Target: ANGPTL4; (-) strand; PAM type: YTN; PAM sequence: TTG
  source 1..20: mol_type = other DNA
agacagagtcttgctctgtc

SEQ ID NO: 16003 - DNA, 20 bp, synthetic construct
  misc_feature 1..20: note = Description of Artificial Sequence: Synthetic oligonucleotide
  misc_feature 1..20: note = Target: ANGPTL4; (-) strand; PAM type: YTN; PAM sequence: TTT
  source 1..20: mol_type = other DNA
gagacagagtcttgctctgt

SEQ ID NO: 16004 - DNA, 20 bp, synthetic construct
  misc_feature 1..20: note = Description of Artificial Sequence: Synthetic oligonucleotide
  misc_feature 1..20: note = Target: ANGPTL4; (-) strand; PAM type: YTN; PAM sequence: TTT
  source 1..20: mol_type = other DNA
tgagacagagtcttgctctg

SEQ ID NO: 16005 - DNA, 20 bp, synthetic construct
  misc_feature 1..20: note = Description of Artificial Sequence: Synthetic oligonucleotide
  misc_feature 1..20: note = Target: ANGPTL4; (-) strand; PAM type: YTN; PAM sequence: TTT
  source 1..20: mol_type = other DNA
ttgagacagagtcttgctct

SEQ ID NO: 16006 - DNA, 20 bp, synthetic construct
  misc_feature 1..20: note = Description of Artificial Sequence: Synthetic oligonucleotide
  misc_feature 1..20: note = Target: ANGPTL4; (-) strand; PAM type: YTN; PAM sequence: TTT
  source 1..20: mol_type = other DNA
tttgagacagagtcttgctc

SEQ ID NO: 16007 - DNA, 20 bp, synthetic construct
  misc_feature 1..20: note = Description of Artificial Sequence: Synthetic oligonucleotide
  misc_feature 1..20: note = Target: ANGPTL4; (-) strand; PAM type: YTN; PAM sequence: CTT
  source 1..20: mol_type = other DNA
ttttgagacagagtcttgct

SEQ ID NO: 16008 - DNA, 20 bp, synthetic construct
  misc_feature 1..20: note = Description of Artificial Sequence: Synthetic oligonucleotide
  misc_feature 1..20: note = Target: ANGPTL4; (-) strand; PAM type: YTN; PAM sequence: TTC
  source 1..20: mol_type = other DNA
ttttttgagacagagtcttg

SEQ ID NO: 16009 - DNA, 20 bp, synthetic construct
  misc_feature 1..20: note = Description of Artificial Sequence: Synthetic oligonucleotide
  misc_feature 1..20: note = Target: ANGPTL4; (-) strand; PAM type: YTN; PAM sequence: TTT
  source 1..20: mol_type = other DNA
cttttttgagacagagtctt

SEQ ID NO: 16010 - DNA, 20 bp, synthetic construct
  misc_feature 1..20: note = Description of Artificial Sequence: Synthetic oligonucleotide
  misc_feature 1..20: note = Target: ANGPTL4; (-) strand; PAM type: YTN; PAM sequence: CTT
  source 1..20: mol_type = other DNA
tcttttttgagacagagtct

SEQ ID NO: 16011 - DNA, 20 bp, synthetic construct
  misc_feature 1..20: note = Description of Artificial Sequence: Synthetic oligonucleotide
  misc_feature 1..20: note = Target: ANGPTL4; (-) strand; PAM type: YTN; PAM sequence: TTC
  source 1..20: mol_type = other DNA
tttcttttttgagacagagt

SEQ ID NO: 16012 - DNA, 20 bp, synthetic construct
  misc_feature 1..20: note = Description of Artificial Sequence: Synthetic oligonucleotide
  misc_feature 1..20: note = Target: ANGPTL4; (-) strand; PAM type: YTN; PAM sequence: TTT
  source 1..20: mol_type = other DNA
ctttcttttttgagacagag

SEQ ID NO: 16013 - DNA, 20 bp, synthetic construct
  misc_feature 1..20: note = Description of Artificial Sequence: Synthetic oligonucleotide
  misc_feature 1..20: note = Target: ANGPTL4; (-) strand; PAM type: YTN; PAM sequence: TTT
  source 1..20: mol_type = other DNA
tctttcttttttgagacaga

SEQ ID NO: 16014 - DNA, 20 bp, synthetic construct
  misc_feature 1..20: note = Description of Artificial Sequence: Synthetic oligonucleotide
  misc_feature 1..20: note = Target: ANGPTL4; (-) strand; PAM type: YTN; PAM sequence: TTT
  source 1..20: mol_type = other DNA
ttctttcttttttgagacag

SEQ ID NO: 16015 - DNA, 20 bp, synthetic construct
  misc_feature 1..20: note = Description of Artificial Sequence: Synthetic oligonucleotide
  misc_feature 1..20: note = Target: ANGPTL4; (-) strand; PAM type: YTN; PAM sequence: TTT
  source 1..20: mol_type = other DNA
tttctttcttttttgagaca

SEQ ID NO: 16016 - DNA, 20 bp, synthetic construct
  misc_feature 1..20: note = Description of Artificial Sequence: Synthetic oligonucleotide
  misc_feature 1..20: note = Target: ANGPTL4; (-) strand; PAM type: YTN; PAM sequence: TTT
  source 1..20: mol_type = other DNA
ttttctttcttttttgagac

SEQ ID NO: 16017 - DNA, 20 bp, synthetic construct
  misc_feature 1..20: note = Description of Artificial Sequence: Synthetic oligonucleotide
  misc_feature 1..20: note = Target: ANGPTL4; (-) strand; PAM type: YTN; PAM sequence: CTT
  source 1..20: mol_type = other DNA
tttttctttcttttttgaga

SEQ ID NO: 16018 - DNA, 20 bp, synthetic construct
  misc_feature 1..20: note = Description of Artificial Sequence: Synthetic oligonucleotide
  misc_feature 1..20: note = Target: ANGPTL4; (-) strand; PAM type: YTN; PAM sequence: TTC
  source 1..20: mol_type = other DNA
tttttttctttcttttttga

SEQ ID NO: 16019 - DNA, 20 bp, synthetic construct
  misc_feature 1..20: note = Description of Artificial Sequence: Synthetic oligonucleotide
  misc_feature 1..20: note = Target: ANGPTL4; (-) strand; PAM type: YTN; PAM sequence: TTT
  source 1..20: mol_type = other DNA
ctttttttctttcttttttg

SEQ ID NO: 16020 - DNA, 20 bp, synthetic construct
  misc_feature 1..20: note = Description of Artificial Sequence: Synthetic oligonucleotide
  misc_feature 1..20: note = Target: ANGPTL4; (-) strand; PAM type: YTN; PAM sequence: CTT
  source 1..20: mol_type = other DNA
tctttttttctttctttttt

SEQ ID NO: 16021 - DNA, 20 bp, synthetic construct
  misc_feature 1..20: note = Description of Artificial Sequence: Synthetic oligonucleotide
  misc_feature 1..20: note = Target: ANGPTL4; (-) strand; PAM type: YTN; PAM sequence: TTC
  source 1..20: mol_type = other DNA
tttctttttttctttctttt

SEQ ID NO: 16022 - DNA, 20 bp, synthetic construct
  misc_feature 1..20: note = Description of Artificial Sequence: Synthetic oligonucleotide
  misc_feature 1..20: note = Target: ANGPTL4; (-) strand; PAM type: YTN; PAM sequence: TTT
  source 1..20: mol_type = other DNA
ctttctttttttctttcttt

SEQ ID NO: 16023 - DNA, 20 bp, synthetic construct
  misc_feature 1..20: note = Description of Artificial Sequence: Synthetic oligonucleotide
  misc_feature 1..20: note = Target: ANGPTL4; (-) strand; PAM type: YTN; PAM sequence: TTT
  source 1..20: mol_type = other DNA
tctttctttttttctttctt

SEQ ID NO: 16024 - DNA, 20 bp, synthetic construct
  misc_feature 1..20: note = Description of Artificial Sequence: Synthetic oligonucleotide
  misc_feature 1..20: note = Target: ANGPTL4; (-) strand; PAM type: YTN; PAM sequence: CTT
  source 1..20: mol_type = other DNA
ttctttctttttttctttct

SEQ ID NO: 16025 - DNA, 20 bp, synthetic construct
  misc_feature 1..20: note = Description of Artificial Sequence: Synthetic oligonucleotide
  misc_feature 1..20: note = Target: ANGPTL4; (-) strand; PAM type: YTN; PAM sequence: TTC
  source 1..20: mol_type = other DNA
ttttctttctttttttcttt

SEQ ID NO: 16026 - DNA, 20 bp, synthetic construct
  misc_feature 1..20: note = Description of Artificial Sequence: Synthetic oligonucleotide
  misc_feature 1..20: note = Target: ANGPTL4; (-) strand; PAM type: YTN; PAM sequence: TTT
  source 1..20: mol_type = other DNA
cttttctttctttttttctt

SEQ ID NO: 16027 - DNA, 20 bp, synthetic construct
  misc_feature 1..20: note = Description of Artificial Sequence: Synthetic oligonucleotide
  misc_feature 1..20: note = Target: ANGPTL4; (-) strand; PAM type: YTN; PAM sequence: TTT
  source 1..20: mol_type = other DNA
tcttttctttctttttttct

SEQ ID NO: 16028 - DNA, 20 bp, synthetic construct
  misc_feature 1..20: note = Description of Artificial Sequence: Synthetic oligonucleotide
  misc_feature 1..20: note = Target: ANGPTL4; (-) strand; PAM type: YTN; PAM sequence: TTT
  source 1..20: mol_type = other DNA
ttcttttctttctttttttc

SEQ ID NO: 16029 - DNA, 20 bp, synthetic construct
  misc_feature 1..20: note = Description of Artificial Sequence: Synthetic oligonucleotide
  misc_feature 1..20: note = Target: ANGPTL4; (-) strand; PAM type: YTN; PAM sequence: CTG
  source 1..20: mol_type = other DNA
ccatggtgtttttcttttct

SEQ ID NO: 16030 - DNA, 20 bp, synthetic construct
  misc_feature 1..20: note = Description of Artificial Sequence: Synthetic oligonucleotide
  misc_feature 1..20: note = Target: ANGPTL4; (-) strand; PAM type: YTN; PAM sequence: TTC
  source 1..20: mol_type = other DNA
ctgccatggtgtttttcttt

SEQ ID NO: 16031 - DNA, 20 bp, synthetic construct
  misc_feature 1..20: note = Description of Artificial Sequence: Synthetic oligonucleotide
  misc_feature 1..20: note = Target: ANGPTL4; (-) strand; PAM type: YTN; PAM sequence: TTT
  source 1..20: mol_type = other DNA
cctgccatggtgtttttctt

SEQ ID NO: 16032 - DNA, 20 bp, synthetic construct
  misc_feature 1..20: note = Description of Artificial Sequence: Synthetic oligonucleotide
  misc_feature 1..20: note = Target: ANGPTL4; (-) strand; PAM type: YTN; PAM sequence: TTA
  source 1..20: mol_type = other DNA
gtttcctgccatggtgtttt

SEQ ID NO: 16033 - DNA, 20 bp, synthetic construct
  misc_feature 1..20: note = Description of Artificial Sequence: Synthetic oligonucleotide
  misc_feature 1..20: note = Target: ANGPTL4; (-) strand; PAM type: YTN; PAM sequence: TTG
  source 1..20: mol_type = other DNA
ttagtttcctgccatggtgt

SEQ ID NO: 16034 - DNA, 20 bp, synthetic construct
  misc_feature 1..20: note = Description of Artificial Sequence: Synthetic oligonucleotide
  misc_feature 1..20: note = Target: ANGPTL4; (-) strand; PAM type: YTN; PAM sequence: CTT
  source 1..20: mol_type = other DNA
gttagtttcctgccatggtg

SEQ ID NO: 16035 - DNA, 20 bp, synthetic construct
  misc_feature 1..20: note = Description of Artificial Sequence: Synthetic oligonucleotide
  misc_feature 1..20: note = Target: ANGPTL4; (-) strand; PAM type: YTN; PAM sequence: CTG
  source 1..20: mol_type = other DNA
gccccttgttagtttcctgc

SEQ ID NO: 16036 - DNA, 20 bp, synthetic construct
  misc_feature 1..20: note = Description of Artificial Sequence: Synthetic oligonucleotide
  misc_feature 1..20: note = Target: ANGPTL4; (-) strand; PAM type: YTN; PAM sequence: TTC
  source 1..20: mol_type = other DNA
ctggccccttgttagtttcc

SEQ ID NO: 16037 - DNA, 20 bp, synthetic construct
  misc_feature 1..20: note = Description of Artificial Sequence: Synthetic oligonucleotide
  misc_feature 1..20: note = Target: ANGPTL4; (-) strand; PAM type: YTN; PAM sequence: CTT
  source 1..20: mol_type = other DNA
cctggccccttgttagtttc

SEQ ID NO: 16038 - DNA, 20 bp, synthetic construct
  misc_feature 1..20: note = Description of Artificial Sequence: Synthetic oligonucleotide
  misc_feature 1..20: note = Target: ANGPTL4; (-) strand; PAM type: YTN; PAM sequence: TTC
  source 1..20: mol_type = other DNA
acatcccagcttcctggccc

SEQ ID NO: 16039 - DNA, 20 bp, synthetic construct
  misc_feature 1..20: note = Description of Artificial Sequence: Synthetic oligonucleotide
  misc_feature 1..20: note = Target: ANGPTL4; (-) strand; PAM type: YTN; PAM sequence: TTA
  source 1..20: mol_type = other DNA
acaggtccaggttcacatcc

SEQ ID NO: 16040 - DNA, 20 bp, synthetic construct
  misc_feature 1..20: note = Description of Artificial Sequence: Synthetic oligonucleotide
  misc_feature 1..20: note = Target: ANGPTL4; (-) strand; PAM type: YTN; PAM sequence: TTT
  source 1..20: mol_type = other DNA
aacaggtccaggttcacatc

SEQ ID NO: 16041 - DNA, 20 bp, synthetic construct
  misc_feature 1..20: note = Description of Artificial Sequence: Synthetic oligonucleotide
  misc_feature 1..20: note = Target: ANGPTL4; (-) strand; PAM type: YTN; PAM sequence: CTG
  source 1..20: mol_type = other DNA
gagtttaacaggtccaggtt

SEQ ID NO: 16042 - DNA, 20 bp, synthetic construct
  misc_feature 1..20: note = Description of Artificial Sequence: Synthetic oligonucleotide
  misc_feature 1..20: note = Target: ANGPTL4; (-) strand; PAM type: YTN; PAM sequence: CTC
  source 1..20: mol_type = other DNA
tggagtttaacaggtccagg

SEQ ID NO: 16043 - DNA, 20 bp, synthetic construct
  misc_feature 1..20: note = Description of Artificial Sequence: Synthetic oligonucleotide
  misc_feature 1..20: note = Target: ANGPTL4; (-) strand; PAM type: YTN; PAM sequence: CTG
  source 1..20: mol_type = other DNA
cagctctggagtttaacagg

SEQ ID NO: 16044 - DNA, 20 bp, synthetic construct
  misc_feature 1..20: note = Description of Artificial Sequence: Synthetic oligonucleotide
  misc_feature 1..20: note = Target: ANGPTL4; (-) strand; PAM type: YTN; PAM sequence: TTA
  source 1..20: mol_type = other DNA
cagctgcagctctggagttt

SEQ ID NO: 16045 - DNA, 20 bp, synthetic construct
  misc_feature 1..20: note = Description of Artificial Sequence: Synthetic oligonucleotide
  misc_feature 1..20: note = Target: ANGPTL4; (-) strand; PAM type: YTN; PAM sequence: TTT
  source 1..20: mol_type = other DNA
acagctgcagctctggagtt

SEQ ID NO: 16046 - DNA, 20 bp, synthetic construct
  misc_feature 1..20: note = Description of Artificial Sequence: Synthetic oligonucleotide
  misc_feature 1..20: note = Target: ANGPTL4; (-) strand; PAM type: YTN; PAM sequence: CTG
  source 1..20: mol_type = other DNA
tggtccaggagagggatgtg

SEQ ID NO: 16047 - DNA, 20 bp, synthetic construct
  misc_feature 1..20: note = Description of Artificial Sequence: Synthetic oligonucleotide
  misc_feature 1..20: note = Target: ANGPTL4; (-) strand; PAM type: YTN; PAM sequence: CTC
  source 1..20: mol_type = other DNA
ctgtggtccaggagagggat

SEQ ID NO: 16048 - DNA, 20 bp, synthetic construct
  misc_feature 1..20: note = Description of Artificial Sequence: Synthetic oligonucleotide
  misc_feature 1..20: note = Target: ANGPTL4; (-) strand; PAM type: YTN; PAM sequence: CTG
  source 1..20: mol_type = other DNA
gggccagtgagctcctgtgg

SEQ ID NO: 16049 - DNA, 20 bp, synthetic construct
  misc_feature 1..20: note = Description of Artificial Sequence: Synthetic oligonucleotide
  misc_feature 1..20: note = Target: ANGPTL4; (-) strand; PAM type: YTN; PAM sequence: TTC
  source 1..20: mol_type = other DNA
caaatgcaggaactggggcc

SEQ ID NO: 16050 - DNA, 20 bp, synthetic construct
  misc_feature 1..20: note = Description of Artificial Sequence: Synthetic oligonucleotide
  misc_feature 1..20: note = Target: ANGPTL4; (-) strand; PAM type: YTN; PAM sequence: TTT
  source 1..20: mol_type = other DNA
ccaaatgcaggaactggggc

SEQ ID NO: 16051 - DNA, 20 bp, synthetic construct
  misc_feature 1..20: note = Description of Artificial Sequence: Synthetic oligonucleotide
  misc_feature 1..20: note = Target: ANGPTL4; (-) strand; PAM type: YTN; PAM sequence: TTT
  source 1..20: mol_type = other DNA
tccaaatgcaggaactgggg

SEQ ID NO: 16052 - DNA, 20 bp, synthetic construct
  misc_feature 1..20: note = Description of Artificial Sequence: Synthetic oligonucleotide
  misc_feature 1..20: note = Target: ANGPTL4; (-) strand; PAM type: YTN; PAM sequence: CTC
  source 1..20: mol_type = other DNA
cccacaccatgaggccagga

SEQ ID NO: 16053 - DNA, 20 bp, synthetic construct
  misc_feature 1..20: note = Description of Artificial Sequence: Synthetic oligonucleotide
  misc_feature 1..20: note = Target: ANGPTL4; (-) strand; PAM type: YTN; PAM sequence: TTA
  source 1..20: mol_type = other DNA
ccaccccctccccacaccat

SEQ ID NO: 16054 - DNA, 20 bp, synthetic construct
  misc_feature 1..20: note = Description of Artificial Sequence: Synthetic oligonucleotide
  misc_feature 1..20: note = Target: ANGPTL4; (-) strand; PAM type: YTN; PAM sequence: TTT
  source 1..20: mol_type = other DNA
accaccccctccccacacca

SEQ ID NO: 16055 - DNA, 20 bp, synthetic construct
  misc_feature 1..20: note = Description of Artificial Sequence: Synthetic oligonucleotide
  misc_feature 1..20: note = Target: ANGPTL4; (-) strand; PAM type: YTN; PAM sequence: CTT
  source 1..20: mol_type = other DNA
taccaccccctccccacacc

SEQ ID NO: 16056 - DNA, 20 bp, synthetic construct
  misc_feature 1..20: note = Description of Artificial Sequence: Synthetic oligonucleotide
  misc_feature 1..20: note = Target: ANGPTL4; (-) strand; PAM type: YTN; PAM sequence: TTC
  source 1..20: mol_type = other DNA
tttaccaccccctccccaca

SEQ ID NO: 16057 - DNA, 20 bp, synthetic construct
  misc_feature 1..20: note = Description of Artificial Sequence: Synthetic oligonucleotide
  misc_feature 1..20: note = Target: ANGPTL4; (-) strand; PAM type: YTN; PAM sequence: TTA
  source 1..20: mol_type = other DNA
attctttaccaccccctccc

SEQ ID NO: 16058 - DNA, 20 bp, synthetic construct
  misc_feature 1..20: note = Description of Artificial Sequence: Synthetic oligonucleotide
  misc_feature 1..20: note = Target: ANGPTL4; (-) strand; PAM type: YTN; PAM sequence: TTA
  source 1..20: mol_type = other DNA
ttaattctttaccaccccct

SEQ ID NO: 16059 - DNA, 20 bp, synthetic construct
  misc_feature 1..20: note = Description of Artificial Sequence: Synthetic oligonucleotide
  misc_feature 1..20: note = Target: ANGPTL4; (-) strand; PAM type: YTN; PAM sequence: CTT
  source 1..20: mol_type = other DNA
attaattctttaccaccccc

SEQ ID NO: 16060 - DNA, 20 bp, synthetic construct
  misc_feature 1..20: note = Description of Artificial Sequence: Synthetic oligonucleotide
  misc_feature 1..20: note = Target: ANGPTL4; (-) strand; PAM type: YTN; PAM sequence: TTA
  source 1..20: mol_type = other DNA
atgccttattaattctttac

SEQ ID NO: 16061 - DNA, 20 bp, synthetic construct
  misc_feature 1..20: note = Description of Artificial Sequence: Synthetic oligonucleotide
  misc_feature 1..20: note = Target: ANGPTL4; (-) strand; PAM type: YTN; PAM sequence: CTG
  source 1..20: mol_type = other DNA
tgatgaatattaatgcctta

SEQ ID NO: 16062 - DNA, 20 bp, synthetic construct
  misc_feature 1..20: note = Description of Artificial Sequence: Synthetic oligonucleotide
  misc_feature 1..20: note = Target: ANGPTL4; (-) strand; PAM type: YTN; PAM sequence: CTG
  source 1..20: mol_type = other DNA
gacccagcctgtgatgaata

SEQ ID NO: 16063 - DNA, 20 bp, synthetic construct
  misc_feature 1..20: note = Description of Artificial Sequence: Synthetic oligonucleotide
  misc_feature 1..20: note = Target: ANGPTL4; (-) strand; PAM type: YTN; PAM sequence: TTA
  source 1..20: mol_type = other DNA
cagtcgcgaggcactggacc

SEQ ID NO: 16064 - DNA, 20 bp, synthetic construct
  misc_feature 1..20: note = Description of Artificial Sequence: Synthetic oligonucleotide
  misc_feature 1..20: note = Target: ANGPTL4; (-) strand; PAM type: YTN; PAM sequence: CTG
  source 1..20: mol_type = other DNA
ggattacagtcgcgaggcac

SEQ ID NO: 16065 - DNA, 20 bp, synthetic construct
  misc_feature 1..20: note = Description of Artificial Sequence: Synthetic oligonucleotide
  misc_feature 1..20: note = Target: ANGPTL4; (-) strand; PAM type: YTN; PAM sequence: CTC
  source 1..20: mol_type = other DNA
ccaaagagctgggattacag

SEQ ID NO: 16066 - DNA, 20 bp, synthetic construct
  misc_feature 1..20: note = Description of Artificial Sequence: Synthetic oligonucleotide
  misc_feature 1..20: note = Target: ANGPTL4; (-) strand; PAM type: YTN; PAM sequence: CTC
  source 1..20: mol_type = other DNA
agcctcccaaagagctggga

SEQ ID NO: 16067 - DNA, 20 bp, synthetic construct
  misc_feature 1..20: note = Description of Artificial Sequence: Synthetic oligonucleotide
  misc_feature 1..20: note = Target: ANGPTL4; (-) strand; PAM type: YTN; PAM sequence: CTC
  source 1..20: mol_type = other DNA
cagcctcagcctcccaaaga

SEQ ID NO: 16068 - DNA, 20 bp, synthetic construct
  misc_feature 1..20: note = Description of Artificial Sequence: Synthetic oligonucleotide
  misc_feature 1..20: note = Target: ANGPTL4; (-) strand; PAM type: YTN; PAM sequence: CTC
  source 1..20: mol_type = other DNA
caaggtcctccagcctcagc

SEQ ID NO: 16069 - DNA, 20 bp, synthetic construct
  misc_feature 1..20: note = Description of Artificial Sequence: Synthetic oligonucleotide
  misc_feature 1..20: note = Target: ANGPTL4; (-) strand; PAM type: YTN; PAM sequence: CTC
  source 1..20: mol_type = other DNA
aaactccaaggtcctccagc

SEQ ID NO: 16070 - DNA, 20 bp, synthetic construct
  misc_feature 1..20: note = Description of Artificial Sequence: Synthetic oligonucleotide
  misc_feature 1..20: note = Target: ANGPTL4; (-) strand; PAM type: YTN; PAM sequence: CTG
  source 1..20: mol_type = other DNA
gtctcaaactccaaggtcct

SEQ ID NO: 16071 - DNA, 20 bp, synthetic construct
  misc_feature 1..20: note = Description of Artificial Sequence: Synthetic oligonucleotide
  misc_feature 1..20: note = Target: ANGPTL4; (-) strand; PAM type: YTN; PAM sequence: TTG
  source 1..20: mol_type = other DNA
cgtaggctggtctcaaactc

SEQ ID NO: 16072 - DNA, 20 bp, synthetic construct
  misc_feature 1..20: note = Description of Artificial Sequence: Synthetic oligonucleotide
  misc_feature 1..20: note = Target: ANGPTL4; (-) strand; PAM type: YTN; PAM sequence: CTG
  source 1..20: mol_type = other DNA
tgttgcgtaggctggtctca

SEQ ID NO: 16073 - DNA, 20 bp, synthetic construct
  misc_feature 1..20: note = Description of Artificial Sequence: Synthetic oligonucleotide
  misc_feature 1..20: note = Target: ANGPTL4; (-) strand; PAM type: YTN; PAM sequence: TTG
  source 1..20: mol_type = other DNA
ctgtgttgcgtaggctggtc

SEQ ID NO: 16074 - DNA, 20 bp, synthetic construct
  misc_feature 1..20: note = Description of Artificial Sequence: Synthetic oligonucleotide
  misc_feature 1..20: note = Target: ANGPTL4; (-) strand; PAM type: YTN; PAM sequence: CTT
  source 1..20: mol_type = other DNA
gctgtgttgcgtaggctggt

SEQ ID NO: 16075 - DNA, 20 bp, synthetic construct
  misc_feature 1..20: note = Description of Artificial Sequence: Synthetic oligonucleotide
  misc_feature 1..20: note = Target: ANGPTL4; (-) strand; PAM type: YTN; PAM sequence: TTA
  source 1..20: mol_type = other DNA
tcgtagagatgaggtcttgc

SEQ ID NO: 16076 - DNA, 20 bp, synthetic construct
  misc_feature 1..20: note = Description of Artificial Sequence: Synthetic oligonucleotide
  misc_feature 1..20: note = Target: ANGPTL4; (-) strand; PAM type: YTN; PAM sequence: TTT
  source 1..20: mol_type = other DNA
atcgtagagatgaggtcttg

SEQ ID NO: 16077 - DNA, 20 bp, synthetic construct
  misc_feature 1..20: note = Description of Artificial Sequence: Synthetic oligonucleotide
  misc_feature 1..20: note = Target: ANGPTL4; (-) strand; PAM type: YTN; PAM sequence: TTA
  source 1..20: mol_type = other DNA
aaaatttatcgtagagatga

SEQ ID NO: 16078 - DNA, 20 bp, synthetic construct
  misc_feature 1..20: note = Description of Artificial Sequence: Synthetic oligonucleotide
  misc_feature 1..20: note = Target: ANGPTL4; (-) strand; PAM type: YTN; PAM sequence: TTT
  source 1..20: mol_type = other DNA
aaaaatttatcgtagagatg

SEQ ID NO: 16079 - DNA, 20 bp, synthetic construct
  misc_feature 1..20: note = Description of Artificial Sequence: Synthetic oligonucleotide
  misc_feature 1..20: note = Target: ANGPTL4; (-) strand; PAM type: YTN; PAM sequence: TTT
  source 1..20: mol_type = other DNA
taaaaatttatcgtagagat

SEQ ID NO: 16080 - DNA, 20 bp, synthetic construct
  misc_feature 1..20: note = Description of Artificial Sequence: Synthetic oligonucleotide
  misc_feature 1..20: note = Target: ANGPTL4; (-) strand; PAM type: YTN; PAM sequence: TTT
  source 1..20: mol_type = other DNA
ttaaaaatttatcgtagaga

SEQ ID NO: 16081 - DNA, 20 bp, synthetic construct
  misc_feature 1..20: note = Description of Artificial Sequence: Synthetic oligonucleotide
  misc_feature 1..20: note = Target: ANGPTL4; (-) strand; PAM type: YTN; PAM sequence: CTT
  source 1..20: mol_type = other DNA
tttaaaaatttatcgtagag

SEQ ID NO: 16082 - DNA, 20 bp, synthetic construct
  misc_feature 1..20: note = Description of Artificial Sequence: Synthetic oligonucleotide
  misc_feature 1..20: note = Target: ANGPTL4; (-) strand; PAM type: YTN; PAM sequence: CTG
  source 1..20: mol_type = other DNA
cacccggactttttaaaaat

SEQ ID NO: 16083 - DNA, 20 bp, synthetic construct
  misc_feature 1..20: note = Description of Artificial Sequence: Synthetic oligonucleotide
  misc_feature 1..20: note = Target: ANGPTL4; (-) strand; PAM type: YTN; PAM sequence: TTA
  source 1..20: mol_type = other DNA
taggcatgagccactgcacc

SEQ ID NO: 16084 - DNA, 20 bp, synthetic construct
  misc_feature 1..20: note = Description of Artificial Sequence: Synthetic oligonucleotide
  misc_feature 1..20: note = Target: ANGPTL4; (-) strand; PAM type: YTN; PAM sequence: CTG
  source 1..20: mol_type = other DNA
ggattataggcatgagccac

SEQ ID NO: 16085 - DNA, 20 bp, synthetic construct
  misc_feature 1..20: note = Description of Artificial Sequence: Synthetic oligonucleotide
  misc_feature 1..20: note = Target: ANGPTL4; (-) strand; PAM type: YTN; PAM sequence: CTC
  source 1..20: mol_type = other DNA
ccaaagtgctgggattatag

SEQ ID NO: 16086 - DNA, 20 bp, synthetic construct
  misc_feature 1..20: note = Description of Artificial Sequence: Synthetic oligonucleotide
  misc_feature 1..20: note = Target: ANGPTL4; (-) strand; PAM type: YTN; PAM sequence: TTG
  source 1..20: mol_type = other DNA
gcctcccaaagtgctgggat

SEQ ID NO: 16087 - DNA, 20 bp, synthetic construct
  misc_feature 1..20: note = Description of Artificial Sequence: Synthetic oligonucleotide
  misc_feature 1..20: note = Target: ANGPTL4; (-) strand; PAM type: YTN; PAM sequence: CTT
  source 1..20: mol_type = other DNA
ggcctcccaaagtgctggga

SEQ ID NO: 16088 - DNA, 20 bp, synthetic construct
  misc_feature 1..20: note = Description of Artificial Sequence: Synthetic oligonucleotide
  misc_feature 1..20: note = Target: ANGPTL4; (-) strand; PAM type: YTN; PAM sequence: CTC
  source 1..20: mol_type = other DNA
atgatccacccgccttggcc

SEQ ID NO: 16089 - DNA, 20 bp, synthetic construct
  misc_feature 1..20: note = Description of Artificial Sequence: Synthetic oligonucleotide
  misc_feature 1..20: note = Target: ANGPTL4; (-) strand; PAM type: YTN; PAM sequence: CTA
  source 1..20: mol_type = other DNA
acctcatgatccacccgcct

SEQ ID NO: 16090 - DNA, 20 bp, synthetic construct
  misc_feature 1..20: note = Description of Artificial Sequence: Synthetic oligonucleotide
  misc_feature 1..20: note = Target: ANGPTL4; (-) strand; PAM type: YTN; PAM sequence: CTC
  source 1..20: mol_type = other DNA
ctaacctcatgatccacccg

SEQ ID NO: 16091 - DNA, 20 bp, synthetic construct
  misc_feature 1..20: note = Description of Artificial Sequence: Synthetic oligonucleotide
  misc_feature 1..20: note = Target: ANGPTL4; (-) strand; PAM type: YTN; PAM sequence: TTG
  source 1..20: mol_type = other DNA
aactcctaacctcatgatcc

SEQ ID NO: 16092 - DNA, 20 bp, synthetic construct
  misc_feature 1..20: note = Description of Artificial Sequence: Synthetic oligonucleotide
  misc_feature 1..20: note = Target: ANGPTL4; (-) strand; PAM type: YTN; PAM sequence: CTT
  source 1..20: mol_type = other DNA
gaactcctaacctcatgatc

SEQ ID NO: 16093 - DNA, 20 bp, synthetic construct
  misc_feature 1..20: note = Description of Artificial Sequence: Synthetic oligonucleotide
  misc_feature 1..20: note = Target: ANGPTL4; (-) strand; PAM type: YTN; PAM sequence: CTG
  source 1..20: mol_type = other DNA
gtcttgaactcctaacctca

SEQ ID NO: 16094 - DNA, 20 bp, synthetic construct
  misc_feature 1..20: note = Description of Artificial Sequence: Synthetic oligonucleotide
  misc_feature 1..20: note = Target: ANGPTL4; (-) strand; PAM type: YTN; PAM sequence: TTG
  source 1..20: mol_type = other DNA
gccaggctggtcttgaactc

SEQ ID NO: 16095 - DNA, 20 bp, synthetic construct
  misc_feature 1..20: note = Description of Artificial Sequence: Synthetic oligonucleotide
  misc_feature 1..20: note = Target: ANGPTL4; (-) strand; PAM type: YTN; PAM sequence: CTT
  source 1..20: mol_type = other DNA
ggccaggctggtcttgaact

SEQ ID NO: 16096 - DNA, 20 bp, synthetic construct
  misc_feature 1..20: note = Description of Artificial Sequence: Synthetic oligonucleotide
  misc_feature 1..20: note = Target: ANGPTL4; (-) strand; PAM type: YTN; PAM sequence: CTA
  source 1..20: mol_type = other DNA
tcttggccaggctggtcttg

SEQ ID NO: 16097 - DNA, 20 bp, synthetic construct
  misc_feature 1..20: note = Description of Artificial Sequence: Synthetic oligonucleotide
  misc_feature 1..20: note = Target: ANGPTL4; (-) strand; PAM type: YTN; PAM sequence: TTC
  source 1..20: mol_type = other DNA
actatcttggccaggctggt

SEQ ID NO: 16098 - DNA, 20 bp, synthetic construct
  misc_feature 1..20: note = Description of Artificial Sequence: Synthetic oligonucleotide
  misc_feature 1..20: note = Target: ANGPTL4; (-) strand; PAM type: YTN; PAM sequence: TTT
  source 1..20: mol_type = other DNA
cactatcttggccaggctgg

SEQ ID NO: 16099 - DNA, 20 bp, synthetic construct
  misc_feature 1..20: note = Description of Artificial Sequence: Synthetic oligonucleotide
  misc_feature 1..20: note = Target: ANGPTL4; (-) strand; PAM type: YTN; PAM sequence: TTA
  source 1..20: mol_type = other DNA
gtagagatggggtttcacta

SEQ ID NO: 16100 - DNA, 20 bp, synthetic construct
  misc_feature 1..20: note = Description of Artificial Sequence: Synthetic oligonucleotide
  misc_feature 1..20: note = Target: ANGPTL4; (-) strand; PAM type: YTN; PAM sequence: TTT
  source 1..20: mol_type = other DNA
agtagagatggggtttcact

SEQ ID NO: 16101 - DNA, 20 bp, synthetic construct
  misc_feature 1..20: note = Description of Artificial Sequence: Synthetic oligonucleotide
  misc_feature 1..20: note = Target: ANGPTL4; (-) strand; PAM type: YTN; PAM sequence: TTT
  source 1..20: mol_type = other DNA
tagtagagatggggtttcac

SEQ ID NO: 16102 - DNA, 20 bp, synthetic construct
  misc_feature 1..20: note = Description of Artificial Sequence: Synthetic oligonucleotide
  misc_feature 1..20: note = Target: ANGPTL4; (-) strand; PAM type: YTN; PAM sequence: TTT
  source 1..20: mol_type = other DNA
ttagtagagatggggtttca

SEQ ID NO: 16103 - DNA, 20 bp, synthetic construct
  misc_feature 1..20: note = Description of Artificial Sequence: Synthetic oligonucleotide
  misc_feature 1..20: note = Target: ANGPTL4; (-) strand; PAM type: YTN; PAM sequence: TTG
  source 1..20: mol_type = other DNA
tatttttagtagagatgggg

SEQ ID NO: 16104 - DNA, 20 bp, synthetic construct
  misc_feature 1..20: note = Description of Artificial Sequence: Synthetic oligonucleotide
  misc_feature 1..20: note = Target: ANGPTL4; (-) strand; PAM type: YTN; PAM sequence: TTT
  source 1..20: mol_type = other DNA
gtatttttagtagagatggg

SEQ ID NO: 16105 - DNA, 20 bp, synthetic construct
  misc_feature 1..20: note = Description of Artificial Sequence: Synthetic oligonucleotide
  misc_feature 1..20: note = Target: ANGPTL4; (-) strand; PAM type: YTN; PAM sequence: TTT
  source 1..20: mol_type = other DNA
tgtatttttagtagagatgg

SEQ ID NO: 16106 - DNA, 20 bp, synthetic construct
  misc_feature 1..20: note = Description of Artificial Sequence: Synthetic oligonucleotide
  misc_feature 1..20: note = Target: ANGPTL4; (-) strand; PAM type: YTN; PAM sequence: TTT
  source 1..20: mol_type = other DNA
ttgtatttttagtagagatg

SEQ ID NO: 16107 - DNA, 20 bp, synthetic construct
  misc_feature 1..20: note = Description of Artificial Sequence: Synthetic oligonucleotide
  misc_feature 1..20: note = Target: ANGPTL4; (-) strand; PAM type: YTN; PAM sequence: TTT
  source 1..20: mol_type = other DNA
tttgtatttttagtagagat

SEQ ID NO: 16108 - DNA, 20 bp, synthetic construct
  misc_feature 1..20: note = Description of Artificial Sequence: Synthetic oligonucleotide
  misc_feature 1..20: note = Target: ANGPTL4; (-) strand; PAM type: YTN; PAM sequence: TTT
  source 1..20: mol_type = other DNA
ttttgtatttttagtagaga

SEQ ID NO: 16109 - DNA, 20 bp, synthetic construct
  misc_feature 1..20: note = Description of Artificial Sequence: Synthetic oligonucleotide
  misc_feature 1..20: note = Target: ANGPTL4; (-) strand; PAM type: YTN; PAM sequence: CTA
  source 1..20: mol_type = other DNA
atttttttgtatttttagta

SEQ ID NO: 16110 - DNA, 20 bp, synthetic construct
  misc_feature 1..20: note = Description of Artificial Sequence: Synthetic oligonucleotide
  misc_feature 1..20: note = Target: ANGPTL4; (-) strand; PAM type: YTN; PAM sequence: CTG
  source 1..20: mol_type = other DNA
gctaatttttttgtattttt

SEQ ID NO: 16111 - DNA, 20 bp, synthetic construct
  misc_feature 1..20: note = Description of Artificial Sequence: Synthetic oligonucleotide
  misc_feature 1..20: note = Target: ANGPTL4; (-) strand; PAM type: YTN; PAM sequence: TTA
  source 1..20: mol_type = other DNA
caggcgcccaccaccacacc

SEQ ID NO: 16112 - DNA, 20 bp, synthetic construct
  misc_feature 1..20: note = Description of Artificial Sequence: Synthetic oligonucleotide
  misc_feature 1..20: note = Target: ANGPTL4; (-) strand; PAM type: YTN; PAM sequence: CTG
  source 1..20: mol_type = other DNA
ggattacaggcgcccaccac

SEQ ID NO: 16113 - DNA, 20 bp, synthetic construct
  misc_feature 1..20: note = Description of Artificial Sequence: Synthetic oligonucleotide
  misc_feature 1..20: note = Target: ANGPTL4; (-) strand; PAM type: YTN; PAM sequence: CTC
  source 1..20: mol_type = other DNA
aagtagctgggattacaggc

SEQ ID NO: 16114 - DNA, 20 bp, synthetic construct
  misc_feature 1..20: note = Description of Artificial Sequence: Synthetic oligonucleotide
  misc_feature 1..20: note = Target: ANGPTL4; (-) strand; PAM type: YTN; PAM sequence: CTC
  source 1..20: mol_type = other DNA
tcaagtagctgggattacag

SEQ ID NO: 16115 - DNA, 20 bp, synthetic construct
  misc_feature 1..20: note = Description of Artificial Sequence: Synthetic oligonucleotide
  misc_feature 1..20: note = Target: ANGPTL4; (-) strand; PAM type: YTN; PAM sequence: TTA
  source 1..20: mol_type = other DNA
gcctctcaagtagctgggat

SEQ ID NO: 16116 - DNA, 20 bp, synthetic construct
  misc_feature 1..20: note = Description of Artificial Sequence: Synthetic oligonucleotide
  misc_feature 1..20: note = Target: ANGPTL4; (-) strand; PAM type: YTN; PAM sequence: CTT
  source 1..20: mol_type = other DNA
agcctctcaagtagctggga

SEQ ID NO: 16117 - DNA, 20 bp, synthetic construct
  misc_feature 1..20: note = Description of Artificial Sequence: Synthetic oligonucleotide
  misc_feature 1..20: note = Target: ANGPTL4; (-) strand; PAM type: YTN; PAM sequence: CTG
  source 1..20: mol_type = other DNA
ccttagcctctcaagtagct

SEQ ID NO: 16118 - DNA, 20 bp, synthetic construct
  misc_feature 1..20: note = Description of Artificial Sequence: Synthetic oligonucleotide
  misc_feature 1..20: note = Target: ANGPTL4; (-) strand; PAM type: YTN; PAM sequence: CTC
  source 1..20: mol_type = other DNA
tgccttagcctctcaagtag

SEQ ID NO: 16119 - DNA, 20 bp, synthetic construct
  misc_feature 1..20: note = Description of Artificial Sequence: Synthetic oligonucleotide
  misc_feature 1..20: note = Target: ANGPTL4; (-) strand; PAM type: YTN; PAM sequence: TTC
  source 1..20: mol_type = other DNA
tctgccttagcctctcaagt

SEQ ID NO: 16120 - DNA, 20 bp, synthetic construct
  misc_feature 1..20: note = Description of Artificial Sequence: Synthetic oligonucleotide
  misc_feature 1..20: note = Target: ANGPTL4; (-) strand; PAM type: YTN; PAM sequence: CTC
  source 1..20: mol_type = other DNA
ccgagtccaagcaattctct

SEQ ID NO: 16121 - DNA, 20 bp, synthetic construct
  misc_feature 1..20: note = Description of Artificial Sequence: Synthetic oligonucleotide
  misc_feature 1..20: note = Target: ANGPTL4; (-) strand; PAM type: YTN; PAM sequence: CTG
  source 1..20: mol_type = other DNA
cctcccgagtccaagcaatt

SEQ ID NO: 16122 - DNA, 20 bp, synthetic construct
  misc_feature 1..20: note = Description of Artificial Sequence: Synthetic oligonucleotide
  misc_feature 1..20: note = Target: ANGPTL4; (-) strand; PAM type: YTN; PAM sequence: CTC
  source 1..20: mol_type = other DNA
tgcctcccgagtccaagcaa

SEQ ID NO: 16123 - DNA, 20 bp, synthetic construct
  misc_feature 1..20: note = Description of Artificial Sequence: Synthetic oligonucleotide
  misc_feature 1..20: note = Target: ANGPTL4; (-) strand; PAM type: YTN; PAM sequence: CTG
  source 1..20: mol_type = other DNA
caccctctgcctcccgagtc

SEQ ID NO: 16124 - DNA, 20 bp, synthetic construct
  misc_feature 1..20: note = Description of Artificial Sequence: Synthetic oligonucleotide
  misc_feature 1..20: note = Target: ANGPTL4; (-) strand; PAM type: YTN; PAM sequence: CTC
  source 1..20: mol_type = other DNA
actgcaccctctgcctcccg

SEQ ID NO: 16125 - DNA, 20 bp, synthetic construct
  misc_feature 1..20: note = Description of Artificial Sequence: Synthetic oligonucleotide
  misc_feature 1..20: note = Target: ANGPTL4; (-) strand; PAM type: YTN; PAM sequence: CTC
  source 1..20: mol_type = other DNA
ggctcactgcaccctctgcc

SEQ ID NO: 16126 - DNA, 20 bp, synthetic construct
  misc_feature 1..20: note = Description of Artificial Sequence: Synthetic oligonucleotide
  misc_feature 1..20: note = Target: ANGPTL4; (-) strand; PAM type: YTN; PAM sequence: CTG
  source 1..20: mol_type = other DNA
gagtgcagtggcatgatctc

SEQ ID NO: 16127 - DNA, 20 bp, synthetic construct
  misc_feature 1..20: note = Description of Artificial Sequence: Synthetic oligonucleotide
  misc_feature 1..20: note = Target: ANGPTL4; (-) strand; PAM type: YTN; PAM sequence: TTG
  source 1..20: mol_type = other DNA
cccaggctggagtgcagtgg

SEQ ID NO: 16128 - DNA, 20 bp, synthetic construct
  misc_feature 1..20: note = Description of Artificial Sequence: Synthetic oligonucleotide
  misc_feature 1..20: note = Target: ANGPTL4; (-) strand; PAM type: YTN; PAM sequence: CTG
  source 1..20: mol_type = other DNA
ttgcccaggctggagtgcag

SEQ ID NO: 16129 - DNA, 20 bp, synthetic construct
  misc_feature 1..20: note = Description of Artificial Sequence: Synthetic oligonucleotide
  misc_feature 1..20: note = Target: ANGPTL4; (-) strand; PAM type: YTN; PAM sequence: CTC
  source 1..20: mol_type = other DNA
tgttgcccaggctggagtgc

SEQ ID NO: 16130 - DNA, 20 bp, synthetic construct
  misc_feature 1..20: note = Description of Artificial Sequence: Synthetic oligonucleotide
  misc_feature 1..20: note = Target: ANGPTL4; (-) strand; PAM type: YTN; PAM sequence: CTC
  source 1..20: mol_type = other DNA
actctgttgcccaggctgga

SEQ ID NO: 16131 - DNA, 20 bp, synthetic construct
  misc_feature 1..20: note = Description of Artificial Sequence: Synthetic oligonucleotide
  misc_feature 1..20: note = Target: ANGPTL4; (-) strand; PAM type: YTN; PAM sequence: TTG
  source 1..20: mol_type = other DNA
aggcagggtctcactctgtt

SEQ ID NO: 16132 - DNA, 20 bp, synthetic construct
  misc_feature 1..20: note = Description of Artificial Sequence: Synthetic oligonucleotide
  misc_feature 1..20: note = Target: ANGPTL4; (-) strand; PAM type: YTN; PAM sequence: TTT
  source 1..20: mol_type = other DNA
gaggcagggtctcactctgt

SEQ ID NO: 16133 - DNA, 20 bp, synthetic construct
  misc_feature 1..20: note = Description of Artificial Sequence: Synthetic oligonucleotide
  misc_feature 1..20: note = Target: ANGPTL4; (-) strand; PAM type: YTN; PAM sequence: TTT
  source 1..20: mol_type = other DNA
tgaggcagggtctcactctg

SEQ ID NO: 16134 - DNA, 20 bp, synthetic construct
  misc_feature 1..20: note = Description of Artificial Sequence: Synthetic oligonucleotide
  misc_feature 1..20: note = Target: ANGPTL4; (-) strand; PAM type: YTN; PAM sequence: TTT
  source 1..20: mol_type = other DNA
ttgaggcagggtctcactct

SEQ ID NO: 16135 - DNA, 20 bp, synthetic construct
  misc_feature 1..20: note = Description of Artificial Sequence: Synthetic oligonucleotide
  misc_feature 1..20: note = Target: ANGPTL4; (-) strand; PAM type: YTN; PAM sequence: TTT
  source 1..20: mol_type = other DNA
tttgaggcagggtctcactc

SEQ ID NO: 16136 - DNA, 20 bp, synthetic construct
  misc_feature 1..20: note = Description of Artificial Sequence: Synthetic oligonucleotide
  misc_feature 1..20: note = Target: ANGPTL4; (-) strand; PAM type: YTN; PAM sequence: TTT
  source 1..20: mol_type = other DNA
ttttgaggcagggtctcact

SEQ ID NO: 16137 - DNA, 20 bp, synthetic construct
  misc_feature 1..20: note = Description of Artificial Sequence: Synthetic oligonucleotide
  misc_feature 1..20: note = Target: ANGPTL4; (-) strand; PAM type: YTN; PAM sequence: TTT
  source 1..20: mol_type = other DNA
tttttgaggcagggtctcac

SEQ ID NO: 16138 - DNA, 20 bp, synthetic construct
  misc_feature 1..20: note = Description of Artificial Sequence: Synthetic oligonucleotide
  misc_feature 1..20: note = Target: ANGPTL4; (-) strand; PAM type: YTN; PAM sequence: TTT
  source 1..20: mol_type = other DNA
ttttttgaggcagggtctca

SEQ ID NO: 16139 - DNA, 20 bp, synthetic construct
  misc_feature 1..20: note = Description of Artificial Sequence: Synthetic oligonucleotide
  misc_feature 1..20: note = Target: ANGPTL4; (-) strand; PAM type: YTN; PAM sequence: TTT
  source 1..20: mol_type = other DNA
tttttttgaggcagggtctc

SEQ ID NO: 16140 - DNA, 20 bp, synthetic construct
  misc_feature 1..20: note = Description of Artificial Sequence: Synthetic oligonucleotide
  misc_feature 1..20: note = Target: ANGPTL4; (-) strand; PAM type: YTN; PAM sequence: TTT
  source 1..20: mol_type = other DNA
ttttttttgaggcagggtct

SEQ ID NO: 16141 - DNA, 20 bp, synthetic construct
  misc_feature 1..20: note = Description of Artificial Sequence: Synthetic oligonucleotide
  misc_feature 1..20: note = Target: ANGPTL4; (-) strand; PAM type: YTN; PAM sequence: TTT
  source 1..20: mol_type = other DNA
tttttttttgaggcagggtc

SEQ ID NO: 16142 - DNA, 20 bp, synthetic construct
  misc_feature 1..20: note = Description of Artificial Sequence: Synthetic oligonucleotide
  misc_feature 1..20: note = Target: ANGPTL4; (-) strand; PAM type: YTN; PAM sequence: TTT
  source 1..20: mol_type = other DNA
ttttttttttgaggcagggt

SEQ ID NO: 16143 - DNA, 20 bp, synthetic construct
  misc_feature 1..20: note = Description of Artificial Sequence: Synthetic oligonucleotide
  misc_feature 1..20: note = Target: ANGPTL4; (-) strand; PAM type: YTN; PAM sequence: TTT
  source 1..20: mol_type = other DNA
tttttttttttgaggcaggg

SEQ ID NO: 16144 - DNA, 20 bp, synthetic construct
  misc_feature 1..20: note = Description of Artificial Sequence: Synthetic oligonucleotide
  misc_feature 1..20: note = Target: ANGPTL4; (-) strand; PAM type: YTN; PAM sequence: TTT
  source 1..20: mol_type = other DNA
ttttttttttttgaggcagg

SEQ ID NO: 16145 - DNA, 20 bp, synthetic construct
  misc_feature 1..20: note = Description of Artificial Sequence: Synthetic oligonucleotide
  misc_feature 1..20: note = Target: ANGPTL4; (-) strand; PAM type: YTN; PAM sequence: CTT
  source 1..20: mol_type = other DNA
tttttttttttttgaggcag

SEQ ID NO: 16146 - DNA, 20 bp, synthetic construct
  misc_feature 1..20: note = Description of Artificial Sequence: Synthetic oligonucleotide
  misc_feature 1..20: note = Target: ANGPTL4; (-) strand; PAM type: YTN; PAM sequence: TTC
  source 1..20: mol_type = other DNA
tttttttttttttttgaggc

SEQ ID NO: 16147 - DNA, 20 bp, synthetic construct
  misc_feature 1..20: note = Description of Artificial Sequence: Synthetic oligonucleotide
  misc_feature 1..20: note = Target: ANGPTL4; (-) strand; PAM type: YTN; PAM sequence: TTG
  source 1..20: mol_type = other DNA
attctttttttttttttttg

SEQ ID NO: 16148 - DNA, 20 bp, synthetic construct
  misc_feature 1..20: note = Description of Artificial Sequence: Synthetic oligonucleotide
  misc_feature 1..20: note = Target: ANGPTL4; (-) strand; PAM type: YTN; PAM sequence: CTT
  source 1..20: mol_type = other DNA
gattcttttttttttttttt

SEQ ID NO: 16149 - DNA, 20 bp, synthetic construct
  misc_feature 1..20: note = Description of Artificial Sequence: Synthetic oligonucleotide
  misc_feature 1..20: note = Target: ANGPTL4; (-) strand; PAM type: YTN; PAM sequence: CTC
  source 1..20: mol_type = other DNA
ttgattcttttttttttttt

SEQ ID NO: 16150 - DNA, 20 bp, synthetic construct
  misc_feature 1..20: note = Description of Artificial Sequence: Synthetic oligonucleotide
  misc_feature 1..20: note = Target: ANGPTL4; (-) strand; PAM type: YTN; PAM sequence: TTC
  source 1..20: mol_type = other DNA
tcttgattcttttttttttt

SEQ ID NO: 16151 - DNA, 20 bp, synthetic construct
  misc_feature 1..20: note = Description of Artificial Sequence: Synthetic oligonucleotide
  misc_feature 1..20: note = Target: ANGPTL4; (-) strand; PAM type: YTN; PAM sequence: TTT
  source 1..20: mol_type = other DNA
ctcttgattctttttttttt

SEQ ID NO: 16152 - DNA, 20 bp, synthetic construct
  misc_feature 1..20: note = Description of Artificial Sequence: Synthetic oligonucleotide
  misc_feature 1..20: note = Target: ANGPTL4; (-) strand; PAM type: YTN; PAM sequence: CTG
  source 1..20: mol_type = other DNA
aaatttctcttgattctttt

SEQ ID NO: 16153 - DNA, 20 bp, synthetic construct
  misc_feature 1..20: note = Description of Artificial Sequence: Synthetic oligonucleotide
  misc_feature 1..20: note = Target: ANGPTL4; (-) strand; PAM type: YTN; PAM sequence: CTC
  source 1..20: mol_type = other DNA
tgaaatttctcttgattctt

SEQ ID NO: 16154 - DNA, 20 bp, synthetic construct
  misc_feature 1..20: note = Description of Artificial Sequence: Synthetic oligonucleotide
  misc_feature 1..20: note = Target: ANGPTL4; (-) strand; PAM type: YTN; PAM sequence: CTC
  source 1..20: mol_type = other DNA
cctctgaaatttctcttgat

SEQ ID NO: 16155 - DNA, 20 bp, synthetic construct
  misc_feature 1..20: note = Description of Artificial Sequence: Synthetic oligonucleotide
  misc_feature 1..20: note = Target: ANGPTL4; (-) strand; PAM type: YTN; PAM sequence: CTC
  source 1..20: mol_type = other DNA
ctccctctgaaatttctctt

SEQ ID NO: 16156 - DNA, 20 bp, synthetic construct
  misc_feature 1..20: note = Description of Artificial Sequence: Synthetic oligonucleotide
  misc_feature 1..20: note = Target: ANGPTL4; (-) strand; PAM type: YTN; PAM sequence: CTC
  source 1..20: mol_type = other DNA
tcctccctctgaaatttctc

SEQ ID NO: 16157 - DNA, 20 bp, synthetic construct
  misc_feature 1..20: note = Description of Artificial Sequence: Synthetic oligonucleotide
  misc_feature 1..20: note = Target: ANGPTL4; (-) strand; PAM type: YTN; PAM sequence: CTG
  source 1..20: mol_type = other DNA
tctctcctccctctgaaatt

SEQ ID NO: 16158 - DNA, 20 bp, synthetic construct
  misc_feature 1..20: note = Description of Artificial Sequence: Synthetic oligonucleotide
  misc_feature 1..20: note = Target: ANGPTL4; (-) strand; PAM type: YTN; PAM sequence: TTC
  source 1..20: mol_type = other DNA
tgtctctcctccctctgaaa

SEQ ID NO: 16159 - DNA, 20 bp, synthetic construct
  misc_feature 1..20: note = Description of Artificial Sequence: Synthetic oligonucleotide
  misc_feature 1..20: note = Target: ANGPTL4; (-) strand; PAM type: YTN; PAM sequence: TTA
  source 1..20: mol_type = other DNA
ttctgtctctcctccctctg

SEQ ID NO: 16160 - DNA, 20 bp, synthetic construct
  misc_feature 1..20: note = Description of Artificial Sequence: Synthetic oligonucleotide
  misc_feature 1..20: note = Target: ANGPTL4; (-) strand; PAM type: YTN; PAM sequence: CTT
  source 1..20: mol_type = other DNA
attctgtctctcctccctct

SEQ ID NO: 16161 - DNA, 20 bp, synthetic construct
  misc_feature 1..20: note = Description of Artificial Sequence: Synthetic oligonucleotide
  misc_feature 1..20: note = Target: ANGPTL4; (-) strand; PAM type: YTN; PAM sequence: TTG
  source 1..20: mol_type = other DNA
ccttattctgtctctcctcc

SEQ ID NO: 16162 - DNA, 20 bp, synthetic construct
  misc_feature 1..20: note = Description of Artificial Sequence: Synthetic oligonucleotide
  misc_feature 1..20: note = Target: ANGPTL4; (-) strand; PAM type: YTN; PAM sequence: CTC
  source 1..20: mol_type = other DNA
agttgccttattctgtctct

SEQ ID NO: 16163 - DNA, 20 bp, synthetic construct
  misc_feature 1..20: note = Description of Artificial Sequence: Synthetic oligonucleotide
  misc_feature 1..20: note = Target: ANGPTL4; (-) strand; PAM type: YTN; PAM sequence: CTA
  source 1..20: mol_type = other DNA
tcatcctcagttgccttatt

SEQ ID NO: 16164 - DNA, 20 bp, synthetic construct
  misc_feature 1..20: note = Description of Artificial Sequence: Synthetic oligonucleotide
  misc_feature 1..20: note = Target: ANGPTL4; (-) strand; PAM type: YTN; PAM sequence: CTC
  source 1..20: mol_type = other DNA
tatcatcctcagttgcctta

SEQ ID NO: 16165 - DNA, 20 bp, synthetic construct
  misc_feature 1..20: note = Description of Artificial Sequence: Synthetic oligonucleotide
  misc_feature 1..20: note = Target: ANGPTL4; (-) strand; PAM type: YTN; PAM sequence: CTC
  source 1..20: mol_type = other DNA
cctctatcatcctcagttgc

SEQ ID NO: 16166 - DNA, 20 bp, synthetic construct
  misc_feature 1..20: note = Description of Artificial Sequence: Synthetic oligonucleotide
  misc_feature 1..20: note = Target: ANGPTL4; (-) strand; PAM type: YTN; PAM sequence: CTC
  source 1..20: mol_type = other DNA
cctccctctatcatcctcag

SEQ ID NO: 16167 - DNA, 20 bp, synthetic construct
  misc_feature 1..20: note = Description of Artificial Sequence: Synthetic oligonucleotide
  misc_feature 1..20: note = Target: ANGPTL4; (-) strand; PAM type: YTN; PAM sequence: CTG
  source 1..20: mol_type = other DNA
cctccctccctctatcatcc

SEQ ID NO: 16168 - DNA, 20 bp, synthetic construct
  misc_feature 1..20: note = Description of Artificial Sequence: Synthetic oligonucleotide
  misc_feature 1..20: note = Target: ANGPTL4; (-) strand; PAM type: YTN; PAM sequence: CTC
  source 1..20: mol_type = other DNA
tgcctccctccctctatcat

SEQ ID NO: 16169 - DNA, 20 bp, synthetic construct
  misc_feature 1..20: note = Description of Artificial Sequence: Synthetic oligonucleotide
  misc_feature 1..20: note = Target: ANGPTL4; (-) strand; PAM type: YTN; PAM sequence: CTC
  source 1..20: mol_type = other DNA
tctgcctccctccctctatc

SEQ ID NO: 16170 - DNA, 20 bp, synthetic construct
  misc_feature 1..20: note = Description of Artificial Sequence: Synthetic oligonucleotide
  misc_feature 1..20: note = Target: ANGPTL4; (-) strand; PAM type: YTN; PAM sequence: CTC
  source 1..20: mol_type = other DNA
ctctctgcctccctccctct

SEQ ID NO: 16171 - DNA, 20 bp, synthetic construct
  misc_feature 1..20: note = Description of Artificial Sequence: Synthetic oligonucleotide
  misc_feature 1..20: note = Target: ANGPTL4; (-) strand; PAM type: YTN; PAM sequence: TTC
  source 1..20: mol_type = other DNA
tcctctctgcctccctccct

SEQ ID NO: 16172 - DNA, 20 bp, synthetic construct
  misc_feature 1..20: note = Description of Artificial Sequence: Synthetic oligonucleotide
  misc_feature 1..20: note = Target: ANGPTL4; (-) strand; PAM type: YTN; PAM sequence: CTT
  source 1..20: mol_type = other DNA
ctcctctctgcctccctccc

SEQ ID NO: 16173 - DNA, 20 bp, synthetic construct
  misc_feature 1..20: note = Description of Artificial Sequence: Synthetic oligonucleotide
  misc_feature 1..20: note = Target: ANGPTL4; (-) strand; PAM type: YTN; PAM sequence: CTC
  source 1..20: mol_type = other DNA
atcttctcctctctgcctcc

SEQ ID NO: 16174 - DNA, 20 bp, synthetic construct
  misc_feature 1..20: note = Description of Artificial Sequence: Synthetic oligonucleotide
  misc_feature 1..20: note = Target: ANGPTL4; (-) strand; PAM type: YTN; PAM sequence: CTG
  source 1..20: mol_type = other DNA
tctcatcttctcctctctgc

SEQ ID NO: 16175 - DNA, 20 bp, synthetic construct
  misc_feature 1..20: note = Description of Artificial Sequence: Synthetic oligonucleotide
  misc_feature 1..20: note = Target: ANGPTL4; (-) strand; PAM type: YTN; PAM sequence: TTC
  source 1..20: mol_type = other DNA
tgtctcatcttctcctctct

SEQ ID NO: 16176 - DNA, 20 bp, synthetic construct
  misc_feature 1..20: note = Description of Artificial Sequence: Synthetic oligonucleotide
  misc_feature 1..20: note = Target: ANGPTL4; (-) strand; PAM type: YTN; PAM sequence: CTT
  source 1..20: mol_type = other DNA
ctgtctcatcttctcctctc

SEQ ID NO: 16177 - DNA, 20 bp, synthetic construct
  misc_feature 1..20: note = Description of Artificial Sequence: Synthetic oligonucleotide
  misc_feature 1..20: note = Target: ANGPTL4; (-) strand; PAM type: YTN; PAM sequence: CTC
  source 1..20: mol_type = other DNA
ccatcaaacccagaggacat

SEQ ID NO: 16178 - DNA, 20 bp, synthetic construct
  misc_feature 1..20: note = Description of Artificial Sequence: Synthetic oligonucleotide
  misc_feature 1..20: note = Target: ANGPTL4; (-) strand; PAM type: YTN; PAM sequence: CTC
  source 1..20: mol_type = other DNA
cctcccatcaaacccagagg

SEQ ID NO: 16179 - DNA, 20 bp, synthetic construct
  misc_feature 1..20: note = Description of Artificial Sequence: Synthetic oligonucleotide
  misc_feature 1..20: note = Target: ANGPTL4; (-) strand; PAM type: YTN; PAM sequence: TTC
  source 1..20: mol_type = other DNA
cctccctcccatcaaaccca

SEQ ID NO: 16180 - DNA, 20 bp, synthetic construct
  misc_feature 1..20: note = Description of Artificial Sequence: Synthetic oligonucleotide
  misc_feature 1..20: note = Target: ANGPTL4; (-) strand; PAM type: YTN; PAM sequence: CTT
  source 1..20: mol_type = other DNA
ccctccctcccatcaaaccc

SEQ ID NO: 16181 - DNA, 20 bp, synthetic construct
  misc_feature 1..20: note = Description of Artificial Sequence: Synthetic oligonucleotide
  misc_feature 1..20: note = Target: ANGPTL4; (-) strand; PAM type: YTN; PAM sequence: TTC
  source 1..20: mol_type = other DNA
cttccctccctcccatcaaa

SEQ ID NO: 16182 - DNA, 20 bp, synthetic construct
  misc_feature 1..20: note = Description of Artificial Sequence: Synthetic oligonucleotide
  misc_feature 1..20: note = Target: ANGPTL4; (-) strand; PAM type: YTN; PAM sequence: CTT
  source 1..20: mol_type = other DNA
ccttccctccctcccatcaa

SEQ ID NO: 16183 - DNA, 20 bp, synthetic construct
  misc_feature 1..20: note = Description of Artificial Sequence: Synthetic oligonucleotide
  misc_feature 1..20: note = Target: ANGPTL4; (-) strand; PAM type: YTN; PAM sequence: CTC
  source 1..20: mol_type = other DNA
catccttccttccctccctc

SEQ ID NO: 16184 - DNA, 20 bp, synthetic construct
  misc_feature 1..20: note = Description of Artificial Sequence: Synthetic oligonucleotide
  misc_feature 1..20: note = Target: ANGPTL4; (-) strand; PAM type: YTN; PAM sequence: TTG
  source 1..20: mol_type = other DNA
tgtctccatccttccttccc

SEQ ID NO: 16185 - DNA, 20 bp, synthetic construct
  misc_feature 1..20: note = Description of Artificial Sequence: Synthetic oligonucleotide
  misc_feature 1..20: note = Target: ANGPTL4; (-) strand; PAM type: YTN; PAM sequence: CTT
  source 1..20: mol_type = other DNA
gtgtctccatccttccttcc

SEQ ID NO: 16186 - DNA, 20 bp, synthetic construct
  misc_feature 1..20: note = Description of Artificial Sequence: Synthetic oligonucleotide
  misc_feature 1..20: note = Target: ANGPTL4; (-) strand; PAM type: YTN; PAM sequence: CTC
  source 1..20: mol_type = other DNA
ttgtgtctccatccttcctt

SEQ ID NO: 16187 - DNA, 20 bp, synthetic construct
  misc_feature 1..20: note = Description of Artificial Sequence: Synthetic oligonucleotide
  misc_feature 1..20: note = Target: ANGPTL4; (-) strand; PAM type: YTN; PAM sequence: CTC
  source 1..20: mol_type = other DNA
cccctcttgtgtctccatcc

SEQ ID NO: 16188 - DNA, 20 bp, synthetic construct
  misc_feature 1..20: note = Description of Artificial Sequence: Synthetic oligonucleotide
  misc_feature 1..20: note = Target: ANGPTL4; (-) strand; PAM type: YTN; PAM sequence: TTC
  source 1..20: mol_type = other DNA
cccatatccactccccctct

SEQ ID NO: 16189 - DNA, 20 bp, synthetic construct
  misc_feature 1..20: note = Description of Artificial Sequence: Synthetic oligonucleotide
  misc_feature 1..20: note = Target: ANGPTL4; (-) strand; PAM type: YTN; PAM sequence: CTT
  source 1..20: mol_type = other DNA
ccccatatccactccccctc

SEQ ID NO: 16190 - DNA, 20 bp, synthetic construct
  misc_feature 1..20: note = Description of Artificial Sequence: Synthetic oligonucleotide
  misc_feature 1..20: note = Target: ANGPTL4; (-) strand; PAM type: YTN; PAM sequence: CTC
  source 1..20: mol_type = other DNA
cttccccatatccactcccc

SEQ ID NO: 16191 - DNA, 20 bp, synthetic construct
  misc_feature 1..20: note = Description of Artificial Sequence: Synthetic oligonucleotide
  misc_feature 1..20: note = Target: ANGPTL4; (-) strand; PAM type: YTN; PAM sequence: TTG
  source 1..20: mol_type = other DNA
actccttccccatatccact

SEQ ID NO: 16192 - DNA, 20 bp, synthetic construct
  misc_feature 1..20: note = Description of Artificial Sequence: Synthetic oligonucleotide
  misc_feature 1..20: note = Target: ANGPTL4; (-) strand; PAM type: YTN; PAM sequence: TTT
  source 1..20: mol_type = other DNA
gactccttccccatatccac

SEQ ID NO: 16193 - DNA, 20 bp, synthetic construct
  misc_feature 1..20: note = Description of Artificial Sequence: Synthetic oligonucleotide
  misc_feature 1..20: note = Target: ANGPTL4; (-) strand; PAM type: YTN; PAM sequence: CTC
  source 1..20: mol_type = other DNA
aatcccataaacaaatttga

SEQ ID NO: 16194 - DNA, 20 bp, synthetic construct
  misc_feature 1..20: note = Description of Artificial Sequence: Synthetic oligonucleotide
  misc_feature 1..20: note = Target: ANGPTL4; (-) strand; PAM type: YTN; PAM sequence: CTC
  source 1..20: mol_type = other DNA
tcaatcccataaacaaattt

SEQ ID NO: 16195 - DNA, 20 bp, synthetic construct
  misc_feature 1..20: note = Description of Artificial Sequence: Synthetic oligonucleotide
  misc_feature 1..20: note = Target: ANGPTL4; (-) strand; PAM type: YTN; PAM sequence: TTC
  source 1..20: mol_type = other DNA
acctctcaatcccataaaca

SEQ ID NO: 16196 - DNA, 20 bp, synthetic construct
  misc_feature 1..20: note = Description of Artificial Sequence: Synthetic oligonucleotide
  misc_feature 1..20: note = Target: ANGPTL4; (-) strand; PAM type: YTN; PAM sequence: CTT
  source 1..20: mol_type = other DNA
cacctctcaatcccataaac

SEQ ID NO: 16197 - DNA, 20 bp, synthetic construct
  misc_feature 1..20: note = Description of Artificial Sequence: Synthetic oligonucleotide
  misc_feature 1..20: note = Target: ANGPTL4; (-) strand; PAM type: YTN; PAM sequence: CTA
  source 1..20: mol_type = other DNA
gccggcttcacctctcaatc

SEQ ID NO: 16198 - DNA, 20 bp, synthetic construct
  misc_feature 1..20: note = Description of Artificial Sequence: Synthetic oligonucleotide
  misc_feature 1..20: note = Target: ANGPTL4; (-) strand; PAM type: YTN; PAM sequence: TTC
  source 1..20: mol_type = other DNA
aagtccccacccgacccaga

SEQ ID NO: 16199 - DNA, 20 bp, synthetic construct
  misc_feature 1..20: note = Description of Artificial Sequence: Synthetic oligonucleotide
  misc_feature 1..20: note = Target: ANGPTL4; (-) strand; PAM type: YTN; PAM sequence: CTA
  source 1..20: mol_type = other DNA
gacagaaaagttcaagtccc

SEQ ID NO: 16200 - DNA, 20 bp, synthetic construct
  misc_feature 1..20: note = Description of Artificial Sequence: Synthetic oligonucleotide
  misc_feature 1..20: note = Target: ANGPTL4; (-) strand; PAM type: YTN; PAM sequence: TTA
  source 1..20: mol_type = other DNA
gctagacagaaaagttcaag

SEQ ID NO: 16201 - DNA, 20 bp, synthetic construct
  misc_feature 1..20: note = Description of Artificial Sequence: Synthetic oligonucleotide
  misc_feature 1..20: note = Target: ANGPTL4; (-) strand; PAM type: YTN; PAM sequence: TTT
  source 1..20: mol_type = other DNA
agctagacagaaaagttcaa

SEQ ID NO: 16202 - DNA, 20 bp, synthetic construct
  misc_feature 1..20: note = Description of Artificial Sequence: Synthetic oligonucleotide
  misc_feature 1..20: note = Target: ANGPTL4; (-) strand; PAM type: YTN; PAM sequence: CTT
  source 1..20: mol_type = other DNA
tagctagacagaaaagttca

SEQ ID NO: 16203 - DNA, 20 bp, synthetic construct
  misc_feature 1..20: note = Description of Artificial Sequence: Synthetic oligonucleotide
  misc_feature 1..20: note = Target: ANGPTL4; (-) strand; PAM type: YTN; PAM sequence: TTA
  source 1..20: mol_type = other DNA
caatcctttagctagacaga

SEQ ID NO: 16204 - DNA, 20 bp, synthetic construct
  misc_feature 1..20: note = Description of Artificial Sequence: Synthetic oligonucleotide
  misc_feature 1..20: note = Target: ANGPTL4; (-) strand; PAM type: YTN; PAM sequence: TTT
  source 1..20: mol_type = other DNA
acaatcctttagctagacag

SEQ ID NO: 16205 - DNA, 20 bp, synthetic construct
  misc_feature 1..20: note = Description of Artificial Sequence: Synthetic oligonucleotide
  misc_feature 1..20: note = Target: ANGPTL4; (-) strand; PAM type: YTN; PAM sequence: TTG
  source 1..20: mol_type = other DNA
gtacgtttacaatcctttag

SEQ ID NO: 16206 - DNA, 20 bp, synthetic construct
  misc_feature 1..20: note = Description of Artificial Sequence: Synthetic oligonucleotide
  misc_feature 1..20: note = Target: ANGPTL4; (-) strand; PAM type: YTN; PAM sequence: CTG
  source 1..20: mol_type = other DNA
attggtacgtttacaatcct

SEQ ID NO: 16207 - DNA, 20 bp, synthetic construct
  misc_feature 1..20: note = Description of Artificial Sequence: Synthetic oligonucleotide
  misc_feature 1..20: note = Target: ANGPTL4; (-) strand; PAM type: YTN; PAM sequence: CTA
  source 1..20: mol_type = other DNA
gacacagagtgctgattggt

SEQ ID NO: 16208 - DNA, 20 bp, synthetic construct
  misc_feature 1..20: note = Description of Artificial Sequence: Synthetic oligonucleotide
  misc_feature 1..20: note = Target: ANGPTL4; (-) strand; PAM type: YTN; PAM sequence: TTA
  source 1..20: mol_type = other DNA
gctagacacagagtgctgat

SEQ ID NO: 16209 - DNA, 20 bp, synthetic construct
  misc_feature 1..20: note = Description of Artificial Sequence: Synthetic oligonucleotide
  misc_feature 1..20: note = Target: ANGPTL4; (-) strand; PAM type: YTN; PAM sequence: TTT
  source 1..20: mol_type = other DNA
agctagacacagagtgctga

SEQ ID NO: 16210 - DNA, 20 bp, synthetic construct
  misc_feature 1..20: note = Description of Artificial Sequence: Synthetic oligonucleotide
  misc_feature 1..20: note = Target: ANGPTL4; (-) strand; PAM type: YTN; PAM sequence: CTT
  source 1..20: mol_type = other DNA
tagctagacacagagtgctg

SEQ ID NO: 16211 - DNA, 20 bp, synthetic construct
  misc_feature 1..20: note = Description of Artificial Sequence: Synthetic oligonucleotide
  misc_feature 1..20: note = Target: ANGPTL4; (-) strand; PAM type: YTN; PAM sequence: TTA
  source 1..20: mol_type = other DNA
caatcctttagctagacaca

SEQ ID NO: 16212 - DNA, 20 bp, synthetic construct
  misc_feature 1..20: note = Description of Artificial Sequence: Synthetic oligonucleotide
  misc_feature 1..20: note = Target: ANGPTL4; (-) strand; PAM type: YTN; PAM sequence: TTT
  source 1..20: mol_type = other DNA
acaatcctttagctagacac

SEQ ID NO: 16213 - DNA, 20 bp, synthetic construct
  misc_feature 1..20: note = Description of Artificial Sequence: Synthetic oligonucleotide
  misc_feature 1..20: note = Target: ANGPTL4; (-) strand; PAM type: YTN; PAM sequence: TTG
  source 1..20: mol_type = other DNA
gtgcatttacaatcctttag

SEQ ID NO: 16214 - DNA, 20 bp, synthetic construct
  misc_feature 1..20: note = Description of Artificial Sequence: Synthetic oligonucleotide
  misc_feature 1..20: note = Target: ANGPTL4; (-) strand; PAM type: YTN; PAM sequence: CTG
  source 1..20: mol_type = other DNA
attggtgcatttacaatcct

SEQ ID NO: 16215 - DNA, 20 bp, synthetic construct
  misc_feature 1..20: note = Description of Artificial Sequence: Synthetic oligonucleotide
  misc_feature 1..20: note = Target: ANGPTL4; (-) strand; PAM type: YTN; PAM sequence: CTA
  source 1..20: mol_type = other DNA
gacacagagtgctgattggt

SEQ ID NO: 16216 - DNA, 20 bp, synthetic construct
  misc_feature 1..20: note = Description of Artificial Sequence: Synthetic oligonucleotide
  misc_feature 1..20: note = Target: ANGPTL4; (-) strand; PAM type: YTN; PAM sequence: TTA
  source 1..20: mol_type = other DNA
gctagacacagagtgctgat

SEQ ID NO: 16217 - DNA, 20 bp, synthetic construct
  misc_feature 1..20: note = Description of Artificial Sequence: Synthetic oligonucleotide
  misc_feature 1..20: note = Target: ANGPTL4; (-) strand; PAM type: YTN; PAM sequence: TTT
  source 1..20: mol_type = other DNA
agctagacacagagtgctga

SEQ ID NO: 16218 - DNA, 20 bp, synthetic construct
  misc_feature 1..20: note = Description of Artificial Sequence: Synthetic oligonucleotide
  misc_feature 1..20: note = Target: ANGPTL4; (-) strand; PAM type: YTN; PAM sequence: CTT
  source 1..20: mol_type = other DNA
tagctagacacagagtgctg

SEQ ID NO: 16219 - DNA, 20 bp, synthetic construct
  misc_feature 1..20: note = Description of Artificial Sequence: Synthetic oligonucleotide
  misc_feature 1..20: note = Target: ANGPTL4; (-) strand; PAM type: YTN; PAM sequence: TTA
  source 1..20: mol_type = other DNA
caaacctttagctagacaca

SEQ ID NO: 16220 - DNA, 20 bp, synthetic construct
  misc_feature 1..20: note = Description of Artificial Sequence: Synthetic oligonucleotide
  misc_feature 1..20: note = Target: ANGPTL4; (-) strand; PAM type: YTN; PAM sequence: TTT
  source 1..20: mol_type = other DNA
acaaacctttagctagacac

SEQ ID NO: 16221 - DNA, 20 bp, synthetic construct
  misc_feature 1..20: note = Description of Artificial Sequence: Synthetic oligonucleotide
  misc_feature 1..20: note = Target: ANGPTL4; (-) strand; PAM type: YTN; PAM sequence: TTG
  source 1..20: mol_type = other DNA
gtgcatttacaaacctttag

SEQ ID NO: 16222 - DNA, 20 bp, synthetic construct
  misc_feature 1..20: note = Description of Artificial Sequence: Synthetic oligonucleotide
  misc_feature 1..20: note = Target: ANGPTL4; (-) strand; PAM type: YTN; PAM sequence: CTG
  source 1..20: mol_type = other DNA
attggtgcatttacaaacct

SEQ ID NO: 16223 - DNA, 20 bp, synthetic construct
  misc_feature 1..20: note = Description of Artificial Sequence: Synthetic oligonucleotide
  misc_feature 1..20: note = Target: ANGPTL4; (-) strand; PAM type: YTN; PAM sequence: CTA
  source 1..20: mol_type = other DNA
gacacagagcgctgattggt

SEQ ID NO: 16224 - DNA, 20 bp, synthetic construct
  misc_feature 1..20: note = Description of Artificial Sequence: Synthetic oligonucleotide
  misc_feature 1..20: note = Target: ANGPTL4; (-) strand; PAM type: YTN; PAM sequence: TTA
  source 1..20: mol_type = other DNA
gctagacacagagcgctgat

SEQ ID NO: 16225 - DNA, 20 bp, synthetic construct
  misc_feature 1..20: note = Description of Artificial Sequence: Synthetic oligonucleotide
  misc_feature 1..20: note = Target: ANGPTL4; (-) strand; PAM type: YTN; PAM sequence: CTG
  source 1..20: mol_type = other DNA
attagctagacacagagcgc

SEQ ID NO: 16226 - DNA, 20 bp, synthetic construct
  misc_feature 1..20: note = Description of Artificial Sequence: Synthetic oligonucleotide
  misc_feature 1..20: note = Target: ANGPTL4; (-) strand; PAM type: YTN; PAM sequence: CTA
  source 1..20: mol_type = other DNA
cctgattagctagacacaga

SEQ ID NO: 16227 - DNA, 20 bp, synthetic construct
  misc_feature 1..20: note = Description of Artificial Sequence: Synthetic oligonucleotide
  misc_feature 1..20: note = Target: ANGPTL4; (-) strand; PAM type: YTN; PAM sequence: CTC
  source 1..20: mol_type = other DNA
caagtcccctacctgattag

SEQ ID NO: 16228 - DNA, 20 bp, synthetic construct
  misc_feature 1..20: note = Description of Artificial Sequence: Synthetic oligonucleotide
  misc_feature 1..20: note = Target: ANGPTL4; (-) strand; PAM type: YTN; PAM sequence: TTC
  source 1..20: mol_type = other DNA
tccaagtcccctacctgatt

SEQ ID NO: 16229 - DNA, 20 bp, synthetic construct
  misc_feature 1..20: note = Description of Artificial Sequence: Synthetic oligonucleotide
  misc_feature 1..20: note = Target: ANGPTL4; (+) strand; PAM type: YTN; PAM sequence: CTT
  source 1..20: mol_type = other DNA
gctctgtcacccaagctgga

SEQ ID NO: 16230 - DNA, 20 bp, synthetic construct
  misc_feature 1..20: note = Description of Artificial Sequence: Synthetic oligonucleotide
  misc_feature 1..20: note = Target: ANGPTL4; (+) strand; PAM type: YTN; PAM sequence: TTG
  source 1..20: mol_type = other DNA
ctctgtcacccaagctggag

SEQ ID NO: 16231 - DNA, 20 bp, synthetic construct
  misc_feature 1..20: note = Description of Artificial Sequence: Synthetic oligonucleotide
  misc_feature 1..20: note = Target: ANGPTL4; (+) strand; PAM type: YTN; PAM sequence: CTC
  source 1..20: mol_type = other DNA
tgtcacccaagctggagtgc

SEQ ID NO: 16232 - DNA, 20 bp, synthetic construct
  misc_feature 1..20: note = Description of Artificial Sequence: Synthetic oligonucleotide
  misc_feature 1..20: note = Target: ANGPTL4; (+) strand; PAM type: YTN; PAM sequence: CTG
  source 1..20: mol_type = other DNA
tcacccaagctggagtgcaa

SEQ ID NO: 16233 - DNA, 20 bp, synthetic construct
  misc_feature 1..20: note = Description of Artificial Sequence: Synthetic oligonucleotide
  misc_feature 1..20: note = Target: ANGPTL4; (+) strand; PAM type: YTN; PAM sequence: CTG
  source 1..20: mol_type = other DNA
gagtgcaatggtacgatctc

SEQ ID NO: 16234 - DNA, 20 bp, synthetic construct
  misc_feature 1..20: note = Description of Artificial Sequence: Synthetic oligonucleotide
  misc_feature 1..20: note = Target: ANGPTL4; (+) strand; PAM type: YTN; PAM sequence: CTC
  source 1..20: mol_type = other DNA
cgcttactgcagcctccacc

SEQ ID NO: 16235 - DNA, 20 bp, synthetic construct
  misc_feature 1..20: note = Description of Artificial Sequence: Synthetic oligonucleotide
  misc_feature 1..20: note = Target: ANGPTL4; (+) strand; PAM type: YTN; PAM sequence: CTT
  source 1..20: mol_type = other DNA
actgcagcctccacctcctg

SEQ ID NO: 16236 - DNA, 20 bp, synthetic construct
  misc_feature 1..20: note = Description of Artificial Sequence: Synthetic oligonucleotide
  misc_feature 1..20: note = Target: ANGPTL4; (+) strand; PAM type: YTN; PAM sequence: TTA
  source 1..20: mol_type = other DNA
ctgcagcctccacctcctgg

SEQ ID NO: 16237 - DNA, 20 bp, synthetic construct
  misc_feature 1..20: note = Description of Artificial Sequence: Synthetic oligonucleotide
  misc_feature 1..20: note = Target: ANGPTL4; (+) strand; PAM type: YTN; PAM sequence: CTG
  source 1..20: mol_type = other DNA
cagcctccacctcctgggtt

SEQ ID NO: 16238 - DNA, 20 bp, synthetic construct
  misc_feature 1..20: note = Description of Artificial Sequence: Synthetic oligonucleotide
  misc_feature 1..20: note = Target: ANGPTL4; (+) strand; PAM type: YTN; PAM sequence: CTC
  source 1..20: mol_type = other DNA
cacctcctgggttcaagcga

SEQ ID NO: 16239 - DNA, 20 bp, synthetic construct
  misc_feature 1..20: note = Description of Artificial Sequence: Synthetic oligonucleotide
  misc_feature 1..20: note = Target: ANGPTL4; (+) strand; PAM type: YTN; PAM sequence: CTC
  source 1..20: mol_type = other DNA
ctgggttcaagcgaatctcc

SEQ ID NO: 16240 - DNA, 20 bp, synthetic construct
  misc_feature 1..20: note = Description of Artificial Sequence: Synthetic oligonucleotide
  misc_feature 1..20: note = Target: ANGPTL4; (+) strand; PAM type: YTN; PAM sequence: CTG
  source 1..20: mol_type = other DNA
ggttcaagcgaatctcccac

SEQ ID NO: 16241 - DNA, 20 bp, synthetic construct
  misc_feature 1..20: note = Description of Artificial Sequence: Synthetic oligonucleotide
  misc_feature 1..20: note = Target: ANGPTL4; (+) strand; PAM type: YTN; PAM sequence: TTC
  source 1..20: mol_type = other DNA
aagcgaatctcccacctcag

SEQ ID NO: 16242 - DNA, 20 bp, synthetic construct
  misc_feature 1..20: note = Description of Artificial Sequence: Synthetic oligonucleotide
  misc_feature 1..20: note = Target: ANGPTL4; (+) strand; PAM type: YTN; PAM sequence: CTC
  source 1..20: mol_type = other DNA
ccacctcagcctcacaaata

SEQ ID NO: 16243 - DNA, 20 bp, synthetic construct
  misc_feature 1..20: note = Description of Artificial Sequence: Synthetic oligonucleotide
  misc_feature 1..20: note = Target: ANGPTL4; (+) strand; PAM type: YTN; PAM sequence: CTC
  source 1..20: mol_type = other DNA
agcctcacaaatagctgaga

SEQ ID NO: 16244 - DNA, 20 bp, synthetic construct
  misc_feature 1..20: note = Description of Artificial Sequence: Synthetic oligonucleotide
  misc_feature 1..20: note = Target: ANGPTL4; (+) strand; PAM type: YTN; PAM sequence: CTC
  source 1..20: mol_type = other DNA
acaaatagctgagattacgg

SEQ ID NO: 16245 - DNA, 20 bp, synthetic construct
  misc_feature 1..20: note = Description of Artificial Sequence: Synthetic oligonucleotide
  misc_feature 1..20: note = Target: ANGPTL4; (+) strand; PAM type: YTN; PAM sequence: CTG
  source 1..20: mol_type = other DNA
agattacggccacacaccac

SEQ ID NO: 16246 - DNA, 20 bp, synthetic construct
  misc_feature 1..20: note = Description of Artificial Sequence: Synthetic oligonucleotide
  misc_feature 1..20: note = Target: ANGPTL4; (+) strand; PAM type: YTN; PAM sequence: TTA
  source 1..20: mol_type = other DNA
cggccacacaccaccatgcc

SEQ ID NO: 16247 - DNA, 20 bp, synthetic construct
  misc_feature 1..20: note = Description of Artificial Sequence: Synthetic oligonucleotide
  misc_feature 1..20: note = Target: ANGPTL4; (+) strand; PAM type: YTN; PAM sequence: CTG
  source 1..20: mol_type = other DNA
ctaatttctgtatttttagt

SEQ ID NO: 16248 - DNA, 20 bp, synthetic construct
  misc_feature 1..20: note = Description of Artificial Sequence: Synthetic oligonucleotide
  misc_feature 1..20: note = Target: ANGPTL4; (+) strand; PAM type: YTN; PAM sequence: CTA
  source 1..20: mol_type = other DNA
atttctgtatttttagtaga

SEQ ID NO: 16249 - DNA, 20 bp, synthetic construct
  misc_feature 1..20: note = Description of Artificial Sequence: Synthetic oligonucleotide
  misc_feature 1..20: note = Target: ANGPTL4; (+) strand; PAM type: YTN; PAM sequence: TTT
  source 1..20: mol_type = other DNA
ctgtatttttagtagagatg

SEQ ID NO: 16250 - DNA, 20 bp, synthetic construct
  misc_feature 1..20: note = Description of Artificial Sequence: Synthetic oligonucleotide
  misc_feature 1..20: note = Target: ANGPTL4; (+) strand; PAM type: YTN; PAM sequence: TTC
  source 1..20: mol_type = other DNA
tgtatttttagtagagatgg

SEQ ID NO: 16251 - DNA, 20 bp, synthetic construct
  misc_feature 1..20: note = Description of Artificial Sequence: Synthetic oligonucleotide
  misc_feature 1..20: note = Target: ANGPTL4; (+) strand; PAM type: YTN; PAM sequence: CTG
  source 1..20: mol_type = other DNA
tatttttagtagagatgggg

SEQ ID NO: 16252 - DNA, 20 bp, synthetic construct
  misc_feature 1..20: note = Description of Artificial Sequence: Synthetic oligonucleotide
  misc_feature 1..20: note = Target: ANGPTL4; (+) strand; PAM type: YTN; PAM sequence: TTT
  source 1..20: mol_type = other DNA
ttagtagagatggggtttca

SEQ ID NO: 16253 - DNA, 20 bp, synthetic construct
  misc_feature 1..20: note = Description of Artificial Sequence: Synthetic oligonucleotide
  misc_feature 1..20: note = Target: ANGPTL4; (+) strand; PAM type: YTN; PAM sequence: TTT
  source 1..20: mol_type = other DNA
tagtagagatggggtttcac

SEQ ID NO: 16254 - DNA, 20 bp, synthetic construct
  misc_feature 1..20: note = Description of Artificial Sequence: Synthetic oligonucleotide
  misc_feature 1..20: note = Target: ANGPTL4; (+) strand; PAM type: YTN; PAM sequence: TTT
  source 1..20: mol_type = other DNA
agtagagatggggtttcacc

SEQ ID NO: 16255 - DNA, 20 bp, synthetic construct
  misc_feature 1..20: note = Description of Artificial Sequence: Synthetic oligonucleotide
  misc_feature 1..20: note = Target: ANGPTL4; (+) strand; PAM type: YTN; PAM sequence: TTA
  source 1..20: mol_type = other DNA
gtagagatggggtttcacca

SEQ ID NO: 16256 - DNA, 20 bp, synthetic construct
  misc_feature 1..20: note = Description of Artificial Sequence: Synthetic oligonucleotide
  misc_feature 1..20: note = Target: ANGPTL4; (+) strand; PAM type: YTN; PAM sequence: TTT
  source 1..20: mol_type = other DNA
caccatgctggccaggctgg

SEQ ID NO: 16257 - DNA, 20 bp, synthetic construct
  misc_feature 1..20: note = Description of Artificial Sequence: Synthetic oligonucleotide
  misc_feature 1..20: note = Target: ANGPTL4; (+) strand; PAM type: YTN; PAM sequence: TTC
  source 1..20: mol_type = other DNA
accatgctggccaggctggt

SEQ ID NO: 16258 - DNA, 20 bp, synthetic construct
  misc_feature 1..20: note = Description of Artificial Sequence: Synthetic oligonucleotide
  misc_feature 1..20: note = Target: ANGPTL4; (+) strand; PAM type: YTN; PAM sequence: CTG
  source 1..20: mol_type = other DNA
gccaggctggtctcgaactc

SEQ ID NO: 16259 - DNA, 20 bp, synthetic construct
  misc_feature 1..20: note = Description of Artificial Sequence: Synthetic oligonucleotide
  misc_feature 1..20: note = Target: ANGPTL4; (+) strand; PAM type: YTN; PAM sequence: CTG
  source 1..20: mol_type = other DNA
gtctcgaactcccagactca

SEQ ID NO: 16260 - DNA, 20 bp, synthetic construct
  misc_feature 1..20: note = Description of Artificial Sequence: Synthetic oligonucleotide
  misc_feature 1..20: note = Target: ANGPTL4; (+) strand; PAM type: YTN; PAM sequence: CTC
  source 1..20: mol_type = other DNA
gaactcccagactcaagtga

SEQ ID NO: 16261 - DNA, 20 bp, synthetic construct
  misc_feature 1..20: note = Description of Artificial Sequence: Synthetic oligonucleotide
  misc_feature 1..20: note = Target: ANGPTL4; (+) strand; PAM type: YTN; PAM sequence: CTC
  source 1..20: mol_type = other DNA
ccagactcaagtgatccacc

SEQ ID NO: 16262 - DNA, 20 bp, synthetic construct
  misc_feature 1..20: note = Description of Artificial Sequence: Synthetic oligonucleotide
  misc_feature 1..20: note = Target: ANGPTL4; (+) strand; PAM type: YTN; PAM sequence: CTC
  source 1..20: mol_type = other DNA
aagtgatccacccacctcag

SEQ ID NO: 16263 - DNA, 20 bp, synthetic construct
  misc_feature 1..20: note = Description of Artificial Sequence: Synthetic oligonucleotide
  misc_feature 1..20: note = Target: ANGPTL4; (+) strand; PAM type: YTN; PAM sequence: CTC
  source 1..20: mol_type = other DNA
agcctcccaaagtgctagga

SEQ ID NO: 16264 - DNA, 20 bp, synthetic construct
  misc_feature 1..20: note = Description of Artificial Sequence: Synthetic oligonucleotide
  misc_feature 1..20: note = Target: ANGPTL4; (+) strand; PAM type: YTN; PAM sequence: CTC
  source 1..20: mol_type = other DNA
ccaaagtgctaggattacag

SEQ ID NO: 16265 - DNA, 20 bp, synthetic construct
  misc_feature 1..20: note = Description of Artificial Sequence: Synthetic oligonucleotide
  misc_feature 1..20: note = Target: ANGPTL4; (+) strand; PAM type: YTN; PAM sequence: CTA
  source 1..20: mol_type = other DNA
ggattacaggtgtgagccac

SEQ ID NO: 16266 - DNA, 20 bp, synthetic construct
  misc_feature 1..20: note = Description of Artificial Sequence: Synthetic oligonucleotide
  misc_feature 1..20: note = Target: ANGPTL4; (+) strand; PAM type: YTN; PAM sequence: TTA
  source 1..20: mol_type = other DNA
caggtgtgagccaccatgcc

SEQ ID NO: 16267 - DNA, 20 bp, synthetic construct
  misc_feature 1..20: note = Description of Artificial Sequence: Synthetic oligonucleotide
  misc_feature 1..20: note = Target: ANGPTL4; (+) strand; PAM type: YTN; PAM sequence: CTA
  source 1..20: mol_type = other DNA
atttttttttttttttgaga

SEQ ID NO: 16268 - DNA, 20 bp, synthetic construct
  misc_feature 1..20: note = Description of Artificial Sequence: Synthetic oligonucleotide
  misc_feature 1..20: note = Target: ANGPTL4; (+) strand; PAM type: YTN; PAM sequence: TTT
  source 1..20: mol_type = other DNA
ttttttttttttgagacaga

SEQ ID NO: 16269 - DNA, 20 bp, synthetic construct
  misc_feature 1..20: note = Description of Artificial Sequence: Synthetic oligonucleotide
  misc_feature 1..20: note = Target: ANGPTL4; (+) strand; PAM type: YTN; PAM sequence: TTT
  source 1..20: mol_type = other DNA
tttttttttttgagacagag

SEQ ID NO: 16270 - DNA, 20 bp, synthetic construct
  misc_feature 1..20: note = Description of Artificial Sequence: Synthetic oligonucleotide
  misc_feature 1..20: note = Target: ANGPTL4; (+) strand; PAM type: YTN; PAM sequence: TTT
  source 1..20: mol_type = other DNA
ttttttttttgagacagagt

SEQ ID NO: 16271 - DNA, 20 bp, synthetic construct
  misc_feature 1..20: note = Description of Artificial Sequence: Synthetic oligonucleotide
  misc_feature 1..20: note = Target: ANGPTL4; (+) strand; PAM type: YTN; PAM sequence: TTT
  source 1..20: mol_type = other DNA
tttttttttgagacagagtc

SEQ ID NO: 16272 - DNA, 20 bp, synthetic construct
  misc_feature 1..20: note = Description of Artificial Sequence: Synthetic oligonucleotide
  misc_feature 1..20: note = Target: ANGPTL4; (+) strand; PAM type: YTN; PAM sequence: TTT
  source 1..20: mol_type = other DNA
ttttttttgagacagagtct

SEQ ID NO: 16273 - DNA, 20 bp, synthetic construct
  misc_feature 1..20: note = Description of Artificial Sequence: Synthetic oligonucleotide
  misc_feature 1..20: note = Target: ANGPTL4; (+) strand; PAM type: YTN; PAM sequence: TTT
  source 1..20: mol_type = other DNA
tttttttgagacagagtctc

SEQ ID NO: 16274 - DNA, 20 bp, synthetic construct
  misc_feature 1..20: note = Description of Artificial Sequence: Synthetic oligonucleotide
  misc_feature 1..20: note = Target: ANGPTL4; (+) strand; PAM type: YTN; PAM sequence: TTT
  source 1..20: mol_type = other DNA
ttttttgagacagagtctcg

SEQ ID NO: 16275 - DNA, 20 bp, synthetic construct
  misc_feature 1..20: note = Description of Artificial Sequence: Synthetic oligonucleotide
  misc_feature 1..20: note = Target: ANGPTL4; (+) strand; PAM type: YTN; PAM sequence: TTT
  source 1..20: mol_type = other DNA
tttttgagacagagtctcgc

SEQ ID NO: 16276 - DNA, 20 bp, synthetic construct
  misc_feature 1..20: note = Description of Artificial Sequence: Synthetic oligonucleotide
  misc_feature 1..20: note = Target: ANGPTL4; (+) strand; PAM type: YTN; PAM sequence: TTT
  source 1..20: mol_type = other DNA
ttttgagacagagtctcgcc

SEQ ID NO: 16277 - DNA, 20 bp, synthetic construct
  misc_feature 1..20: note = Description of Artificial Sequence: Synthetic oligonucleotide
  misc_feature 1..20: note = Target: ANGPTL4; (+) strand; PAM type: YTN; PAM sequence: TTT
  source 1..20: mol_type = other DNA
tttgagacagagtctcgccc

SEQ ID NO: 16278 - DNA, 20 bp, synthetic construct
  misc_feature 1..20: note = Description of Artificial Sequence: Synthetic oligonucleotide
  misc_feature 1..20: note = Target: ANGPTL4; (+) strand; PAM type: YTN; PAM sequence: TTT
  source 1..20: mol_type = other DNA
ttgagacagagtctcgccct

SEQ ID NO: 16279 - DNA, 20 bp, synthetic construct
  misc_feature 1..20: note = Description of Artificial Sequence: Synthetic oligonucleotide
  misc_feature 1..20: note = Target: ANGPTL4; (+) strand; PAM type: YTN; PAM sequence: TTT
  source 1..20: mol_type = other DNA
tgagacagagtctcgccctg

SEQ ID NO: 16280 - DNA, 20 bp, synthetic construct
  misc_feature 1..20: note = Description of Artificial Sequence: Synthetic oligonucleotide
  misc_feature 1..20: note = Target: ANGPTL4; (+) strand; PAM type: YTN; PAM sequence: TTT
  source 1..20: mol_type = other DNA
gagacagagtctcgccctgt

SEQ ID NO: 16281 - DNA, 20 bp, synthetic construct
  misc_feature 1..20: note = Description of Artificial Sequence: Synthetic oligonucleotide
  misc_feature 1..20: note = Target: ANGPTL4; (+) strand; PAM type: YTN; PAM sequence: TTG
  source 1..20: mol_type = other DNA
agacagagtctcgccctgtt

SEQ ID NO: 16282 - DNA, 20 bp, synthetic construct
  misc_feature 1..20: note = Description of Artificial Sequence: Synthetic oligonucleotide
  misc_feature 1..20: note = Target: ANGPTL4; (+) strand; PAM type: YTN; PAM sequence: CTC
  source 1..20: mol_type = other DNA
gccctgttgcccaggctgga

SEQ ID NO: 16283 - DNA, 20 bp, synthetic construct
  misc_feature 1..20: note = Description of Artificial Sequence: Synthetic oligonucleotide
  misc_feature 1..20: note = Target: ANGPTL4; (+) strand; PAM type: YTN; PAM sequence: CTG
  source 1..20: mol_type = other DNA
ttgcccaggctggagtgcag

SEQ ID NO: 16284 - DNA, 20 bp, synthetic construct
  misc_feature 1..20: note = Description of Artificial Sequence: Synthetic oligonucleotide
  misc_feature 1..20: note = Target: ANGPTL4; (+) strand; PAM type: YTN; PAM sequence: TTG
  source 1..20: mol_type = other DNA
cccaggctggagtgcagtgg

SEQ ID NO: 16285 - DNA, 20 bp, synthetic construct
  misc_feature 1..20: note = Description of Artificial Sequence: Synthetic oligonucleotide
  misc_feature 1..20: note = Target: ANGPTL4; (+) strand; PAM type: YTN; PAM sequence: CTG
  source 1..20: mol_type = other DNA
gagtgcagtggcgcaatctc

SEQ ID NO: 16286 - DNA, 20 bp, synthetic construct
  misc_feature 1..20: note = Description of Artificial Sequence: Synthetic oligonucleotide
  misc_feature 1..20: note = Target: ANGPTL4; (+) strand; PAM type: YTN; PAM sequence: CTC
  source 1..20: mol_type = other DNA
tgcttactgcaccctctgcc

SEQ ID NO: 16287 - DNA, 20 bp, synthetic construct
  misc_feature 1..20: note = Description of Artificial Sequence: Synthetic oligonucleotide
  misc_feature 1..20: note = Target: ANGPTL4; (+) strand; PAM type: YTN; PAM sequence: CTG
  source 1..20: mol_type = other DNA
cttactgcaccctctgcctc

SEQ ID NO: 16288 - DNA, 20 bp, synthetic construct
  misc_feature 1..20: note = Description of Artificial Sequence: Synthetic oligonucleotide
  misc_feature 1..20: note = Target: ANGPTL4; (+) strand; PAM type: YTN; PAM sequence: CTT
  source 1..20: mol_type = other DNA
actgcaccctctgcctcccg

SEQ ID NO: 16289 - DNA, 20 bp, synthetic construct
  misc_feature 1..20: note = Description of Artificial Sequence: Synthetic oligonucleotide
  misc_feature 1..20: note = Target: ANGPTL4; (+) strand; PAM type: YTN; PAM sequence: TTA
  source 1..20: mol_type = other DNA
ctgcaccctctgcctcccgg

SEQ ID NO: 16290 - DNA, 20 bp, synthetic construct
  misc_feature 1..20: note = Description of Artificial Sequence: Synthetic oligonucleotide
  misc_feature 1..20: note = Target: ANGPTL4; (+) strand; PAM type: YTN; PAM sequence: CTG
  source 1..20: mol_type = other DNA
caccctctgcctcccgggtt

SEQ ID NO: 16291 - DNA, 20 bp, synthetic construct
  misc_feature 1..20: note = Description of Artificial Sequence: Synthetic oligonucleotide
  misc_feature 1..20: note = Target: ANGPTL4; (+) strand; PAM type: YTN; PAM sequence: CTC
  source 1..20: mol_type = other DNA
tgcctcccgggttccagcga

SEQ ID NO: 16292 - DNA, 20 bp, synthetic construct
  misc_feature 1..20: note = Description of Artificial Sequence: Synthetic oligonucleotide
  misc_feature 1..20: note = Target: ANGPTL4; (+) strand; PAM type: YTN; PAM sequence: CTG
  source 1..20: mol_type = other DNA
cctcccgggttccagcgatt

SEQ ID NO: 16293 - DNA, 20 bp, synthetic construct
  misc_feature 1..20: note = Description of Artificial Sequence: Synthetic oligonucleotide
  misc_feature 1..20: note = Target: ANGPTL4; (+) strand; PAM type: YTN; PAM sequence: CTC
  source 1..20: mol_type = other DNA
ccgggttccagcgattctcc

SEQ ID NO: 16294 - DNA, 20 bp, synthetic construct
  misc_feature 1..20: note = Description of Artificial Sequence: Synthetic oligonucleotide
  misc_feature 1..20: note = Target: ANGPTL4; (+) strand; PAM type: YTN; PAM sequence: TTC
  source 1..20: mol_type = other DNA
cagcgattctcctgccccag

SEQ ID NO: 16295 - DNA, 20 bp, synthetic construct
  misc_feature 1..20: note = Description of Artificial Sequence: Synthetic oligonucleotide
  misc_feature 1..20: note = Target: ANGPTL4; (+) strand; PAM type: YTN; PAM sequence: TTC
  source 1..20: mol_type = other DNA
tcctgccccagcctcccgag

SEQ ID NO: 16296 - DNA, 20 bp, synthetic construct
  misc_feature 1..20: note = Description of Artificial Sequence: Synthetic oligonucleotide
  misc_feature 1..20: note = Target: ANGPTL4; (+) strand; PAM type: YTN; PAM sequence: CTC
  source 1..20: mol_type = other DNA
ctgccccagcctcccgagta

SEQ ID NO: 16297 - DNA, 20 bp, synthetic construct
  misc_feature 1..20: note = Description of Artificial Sequence: Synthetic oligonucleotide
  misc_feature 1..20: note = Target: ANGPTL4; (+) strand; PAM type: YTN; PAM sequence: CTG
  source 1..20: mol_type = other DNA
ccccagcctcccgagtaact

SEQ ID NO: 16298 - DNA, 20 bp, synthetic construct
  misc_feature 1..20: note = Description of Artificial Sequence: Synthetic oligonucleotide
  misc_feature 1..20: note = Target: ANGPTL4; (+) strand; PAM type: YTN; PAM sequence: CTC
  source 1..20: mol_type = other DNA
ccgagtaactgggattacag

SEQ ID NO: 16299 - DNA, 20 bp, synthetic construct
  misc_feature 1..20: note = Description of Artificial Sequence: Synthetic oligonucleotide
  misc_feature 1..20: note = Target: ANGPTL4; (+) strand; PAM type: YTN; PAM sequence: CTG
  source 1..20: mol_type = other DNA
ggattacaggcgcgcgcctc

SEQ ID NO: 16300 - DNA, 20 bp, synthetic construct
  misc_feature 1..20: note = Description of Artificial Sequence: Synthetic oligonucleotide
  misc_feature 1..20: note = Target: ANGPTL4; (+) strand; PAM type: YTN; PAM sequence: TTA
  source 1..20: mol_type = other DNA
caggcgcgcgcctccacgcc

SEQ ID NO: 16301 - DNA, 20 bp, synthetic construct
  misc_feature 1..20: note = Description of Artificial Sequence: Synthetic oligonucleotide
  misc_feature 1..20: note = Target: ANGPTL4; (+) strand; PAM type: YTN; PAM sequence: CTC
  source 1..20: mol_type = other DNA
cacgcctggctaatttttac

SEQ ID NO: 16302 - DNA, 20 bp, synthetic construct
  misc_feature 1..20: note = Description of Artificial Sequence: Synthetic oligonucleotide
  misc_feature 1..20: note = Target: ANGPTL4; (+) strand; PAM type: YTN; PAM sequence: CTG
  source 1..20: mol_type = other DNA
gctaatttttacatttttag

SEQ ID NO: 16303 - DNA, 20 bp, synthetic construct
  misc_feature 1..20: note = Description of Artificial Sequence: Synthetic oligonucleotide
  misc_feature 1..20: note = Target: ANGPTL4; (+) strand; PAM type: YTN; PAM sequence: CTA
  source 1..20: mol_type = other DNA
atttttacatttttagtaga

SEQ ID NO: 16304 - DNA, 20 bp, synthetic construct
  misc_feature 1..20: note = Description of Artificial Sequence: Synthetic oligonucleotide
  misc_feature 1..20: note = Target: ANGPTL4; (+) strand; PAM type: YTN; PAM sequence: TTT
  source 1..20: mol_type = other DNA
ttacatttttagtagagacc

SEQ ID NO: 16305 - DNA, 20 bp, synthetic construct
  misc_feature 1..20: note = Description of Artificial Sequence: Synthetic oligonucleotide
  misc_feature 1..20: note = Target: ANGPTL4; (+) strand; PAM type: YTN; PAM sequence: TTT
  source 1..20: mol_type = other DNA
tacatttttagtagagaccg

SEQ ID NO: 16306 - DNA, 20 bp, synthetic construct
  misc_feature 1..20: note = Description of Artificial Sequence: Synthetic oligonucleotide
  misc_feature 1..20: note = Target: ANGPTL4; (+) strand; PAM type: YTN; PAM sequence: TTT
  source 1..20: mol_type = other DNA
acatttttagtagagaccgg

SEQ ID NO: 16307 - DNA, 20 bp, synthetic construct
  misc_feature 1..20: note = Description of Artificial Sequence: Synthetic oligonucleotide
  misc_feature 1..20: note = Target: ANGPTL4; (+) strand; PAM type: YTN; PAM sequence: TTA
  source 1..20: mol_type = other DNA
catttttagtagagaccggg

SEQ ID NO: 16308 - DNA, 20 bp, synthetic construct
  misc_feature 1..20: note = Description of Artificial Sequence: Synthetic oligonucleotide
  misc_feature 1..20: note = Target: ANGPTL4; (+) strand; PAM type: YTN; PAM sequence: TTT
  source 1..20: mol_type = other DNA
ttagtagagaccgggtttca

SEQ ID NO: 16309 - DNA, 20 bp, synthetic construct
  misc_feature 1..20: note = Description of Artificial Sequence: Synthetic oligonucleotide
  misc_feature 1..20: note = Target: ANGPTL4; (+) strand; PAM type: YTN; PAM sequence: TTT
  source 1..20: mol_type = other DNA
tagtagagaccgggtttcac

SEQ ID NO: 16310 - DNA, 20 bp, synthetic construct
  misc_feature 1..20: note = Description of Artificial Sequence: Synthetic oligonucleotide
  misc_feature 1..20: note = Target: ANGPTL4; (+) strand; PAM type: YTN; PAM sequence: TTT
  source 1..20: mol_type = other DNA
agtagagaccgggtttcacc

SEQ ID NO: 16311 - DNA, 20 bp, synthetic construct
  misc_feature 1..20: note = Description of Artificial Sequence: Synthetic oligonucleotide
  misc_feature 1..20: note = Target: ANGPTL4; (+) strand; PAM type: YTN; PAM sequence: TTA
  source 1..20: mol_type = other DNA
gtagagaccgggtttcacca

SEQ ID NO: 16312 - DNA, 20 bp, synthetic construct
  misc_feature 1..20: note = Description of Artificial Sequence: Synthetic oligonucleotide
  misc_feature 1..20: note = Target: ANGPTL4; (+) strand; PAM type: YTN; PAM sequence: TTT
  source 1..20: mol_type = other DNA
caccatgttggtcaggctgg

SEQ ID NO: 16313 - DNA, 20 bp, synthetic construct
  misc_feature 1..20: note = Description of Artificial Sequence: Synthetic oligonucleotide
  misc_feature 1..20: note = Target: ANGPTL4; (+) strand; PAM type: YTN; PAM sequence: TTC
  source 1..20: mol_type = other DNA
accatgttggtcaggctggt

SEQ ID NO: 16314 - DNA, 20 bp, synthetic construct
  misc_feature 1..20: note = Description of Artificial Sequence: Synthetic oligonucleotide
  misc_feature 1..20: note = Target: ANGPTL4; (+) strand; PAM type: YTN; PAM sequence: TTG
  source 1..20: mol_type = other DNA
gtcaggctggtctcgaactt

SEQ ID NO: 16315 - DNA, 20 bp, synthetic construct
  misc_feature 1..20: note = Description of Artificial Sequence: Synthetic oligonucleotide
  misc_feature 1..20: note = Target: ANGPTL4; (+) strand; PAM type: YTN; PAM sequence: CTG
  source 1..20: mol_type = other DNA
gtctcgaacttctgacctca

SEQ ID NO: 16316 - DNA, 20 bp, synthetic construct
  misc_feature 1..20: note = Description of Artificial Sequence: Synthetic oligonucleotide
  misc_feature 1..20: note = Target: ANGPTL4; (+) strand; PAM type: YTN; PAM sequence: CTC
  source 1..20: mol_type = other DNA
gaacttctgacctcacgatc

SEQ ID NO: 16317 - DNA, 20 bp, synthetic construct
  misc_feature 1..20: note = Description of Artificial Sequence: Synthetic oligonucleotide
  misc_feature 1..20: note = Target: ANGPTL4; (+) strand; PAM type: YTN; PAM sequence: CTT
  source 1..20: mol_type = other DNA
ctgacctcacgatctgccca

SEQ ID NO: 16318 - DNA, 20 bp, synthetic construct
  misc_feature 1..20: note = Description of Artificial Sequence: Synthetic oligonucleotide
  misc_feature 1..20: note = Target: ANGPTL4; (+) strand; PAM type: YTN; PAM sequence: TTC
  source 1..20: mol_type = other DNA
tgacctcacgatctgcccac

SEQ ID NO: 16319 - DNA, 20 bp, synthetic construct
  misc_feature 1..20: note = Description of Artificial Sequence: Synthetic oligonucleotide
  misc_feature 1..20: note = Target: ANGPTL4; (+) strand; PAM type: YTN; PAM sequence: CTG
  source 1..20: mol_type = other DNA
acctcacgatctgcccacct

SEQ ID NO: 16320 - DNA, 20 bp, synthetic construct
  misc_feature 1..20: note = Description of Artificial Sequence: Synthetic oligonucleotide
  misc_feature 1..20: note = Target: ANGPTL4; (+) strand; PAM type: YTN; PAM sequence: CTC
  source 1..20: mol_type = other DNA
acgatctgcccaccttggac

SEQ ID NO: 16321 - DNA, 20 bp, synthetic construct
  misc_feature 1..20: note = Description of Artificial Sequence: Synthetic oligonucleotide
  misc_feature 1..20: note = Target: ANGPTL4; (+) strand; PAM type: YTN; PAM sequence: CTG
  source 1..20: mol_type = other DNA
cccaccttggactcccaaag

SEQ ID NO: 16322 - DNA, 20 bp, synthetic construct
  misc_feature 1..20: note = Description of Artificial Sequence: Synthetic oligonucleotide
  misc_feature 1..20: note = Target: ANGPTL4; (+) strand; PAM type: YTN; PAM sequence: CTT
  source 1..20: mol_type = other DNA
ggactcccaaagtgctggta

SEQ ID NO: 16323 - DNA, 20 bp, synthetic construct
  misc_feature 1..20: note = Description of Artificial Sequence: Synthetic oligonucleotide
  misc_feature 1..20: note = Target: ANGPTL4; (+) strand; PAM type: YTN; PAM sequence: TTG
  source 1..20: mol_type = other DNA
gactcccaaagtgctggtat

SEQ ID NO: 16324 - DNA, 20 bp, synthetic construct
  misc_feature 1..20: note = Description of Artificial Sequence: Synthetic oligonucleotide
  misc_feature 1..20: note = Target: ANGPTL4; (+) strand; PAM type: YTN; PAM sequence: CTC
  source 1..20: mol_type = other DNA
ccaaagtgctggtattacag

SEQ ID NO: 16325 - DNA, 20 bp, synthetic construct
  misc_feature 1..20: note = Description of Artificial Sequence: Synthetic oligonucleotide
  misc_feature 1..20: note = Target: ANGPTL4; (+) strand; PAM type: YTN; PAM sequence: CTG
  source 1..20: mol_type = other DNA
gtattacaggcatgagccac

SEQ ID NO: 16326 - DNA, 20 bp, synthetic construct
  misc_feature 1..20: note = Description of Artificial Sequence: Synthetic oligonucleotide
  misc_feature 1..20: note = Target: ANGPTL4; (+) strand; PAM type: YTN; PAM sequence: TTA
  source 1..20: mol_type = other DNA
caggcatgagccaccgtgcc

SEQ ID NO: 16327 - DNA, 20 bp, synthetic construct
  misc_feature 1..20: note = Description of Artificial Sequence: Synthetic oligonucleotide
  misc_feature 1..20: note = Target: ANGPTL4; (+) strand; PAM type: YTN; PAM sequence: CTG
  source 1..20: mol_type = other DNA
gccccagctaattttttaaa

SEQ ID NO: 16328 - DNA, 20 bp, synthetic construct
  misc_feature 1..20: note = Description of Artificial Sequence: Synthetic oligonucleotide
  misc_feature 1..20: note = Target: ANGPTL4; (+) strand; PAM type: YTN; PAM sequence: CTA
  source 1..20: mol_type = other DNA
attttttaaattttttgtac

SEQ ID NO: 16329 - DNA, 20 bp, synthetic construct
  misc_feature 1..20: note = Description of Artificial Sequence: Synthetic oligonucleotide
  misc_feature 1..20: note = Target: ANGPTL4; (+) strand; PAM type: YTN; PAM sequence: TTT
  source 1..20: mol_type = other DNA
tttaaattttttgtacagac

SEQ ID NO: 16330 - DNA, 20 bp, synthetic construct
  misc_feature 1..20: note = Description of Artificial Sequence: Synthetic oligonucleotide
  misc_feature 1..20: note = Target: ANGPTL4; (+) strand; PAM type: YTN; PAM sequence: TTT
  source 1..20: mol_type = other DNA
ttaaattttttgtacagaca

SEQ ID NO: 16331 - DNA, 20 bp, synthetic construct
  misc_feature 1..20: note = Description of Artificial Sequence: Synthetic oligonucleotide
  misc_feature 1..20: note = Target: ANGPTL4; (+) strand; PAM type: YTN; PAM sequence: TTT
  source 1..20: mol_type = other DNA
taaattttttgtacagacag

SEQ ID NO: 16332 - DNA, 20 bp, synthetic construct
  misc_feature 1..20: note = Description of Artificial Sequence: Synthetic oligonucleotide
  misc_feature 1..20: note = Target: ANGPTL4; (+) strand; PAM type: YTN; PAM sequence: TTT
  source 1..20: mol_type = other DNA
aaattttttgtacagacagg

SEQ ID NO: 16333 - DNA, 20 bp, synthetic construct
  misc_feature 1..20: note = Description of Artificial Sequence: Synthetic oligonucleotide
  misc_feature 1..20: note = Target: ANGPTL4; (+) strand; PAM type: YTN; PAM sequence: TTA
  source 1..20: mol_type = other DNA
aattttttgtacagacaggg

SEQ ID NO: 16334 - DNA, 20 bp, synthetic construct
  misc_feature 1..20: note = Description of Artificial Sequence: Synthetic oligonucleotide
  misc_feature 1..20: note = Target: ANGPTL4; (+) strand; PAM type: YTN; PAM sequence: TTT
  source 1..20: mol_type = other DNA
tttgtacagacagggtcttg

SEQ ID NO: 16335 - DNA, 20 bp, synthetic construct
  misc_feature 1..20: note = Description of Artificial Sequence: Synthetic oligonucleotide
  misc_feature 1..20: note = Target: ANGPTL4; (+) strand; PAM type: YTN; PAM sequence: TTT
  source 1..20: mol_type = other DNA
ttgtacagacagggtcttgc

SEQ ID NO: 16336 - DNA, 20 bp, synthetic construct
  misc_feature 1..20: note = Description of Artificial Sequence: Synthetic oligonucleotide
  misc_feature 1..20: note = Target: ANGPTL4; (+) strand; PAM type: YTN; PAM sequence: TTT
  source 1..20: mol_type = other DNA
tgtacagacagggtcttgcc

SEQ ID NO: 16337 - DNA, 20 bp, synthetic construct
  misc_feature 1..20: note = Description of Artificial Sequence: Synthetic oligonucleotide
  misc_feature 1..20: note = Target: ANGPTL4; (+) strand; PAM type: YTN; PAM sequence: TTT
  source 1..20: mol_type = other DNA
gtacagacagggtcttgcca

SEQ ID NO: 16338 - DNA, 20 bp, synthetic construct
  misc_feature 1..20: note = Description of Artificial Sequence: Synthetic oligonucleotide
  misc_feature 1..20: note = Target: ANGPTL4; (+) strand; PAM type: YTN; PAM sequence: TTG
  source 1..20: mol_type = other DNA
tacagacagggtcttgccat

SEQ ID NO: 16339 - DNA, 20 bp, synthetic construct
  misc_feature 1..20: note = Description of Artificial Sequence: Synthetic oligonucleotide
  misc_feature 1..20: note = Target: ANGPTL4; (+) strand; PAM type: YTN; PAM sequence: CTT
  source 1..20: mol_type = other DNA
gccatgttacccaatcttga

SEQ ID NO: 16340 - DNA, 20 bp, synthetic construct
  misc_feature 1..20: note = Description of Artificial Sequence: Synthetic oligonucleotide
  misc_feature 1..20: note = Target: ANGPTL4; (+) strand; PAM type: YTN; PAM sequence: TTG
  source 1..20: mol_type = other DNA
ccatgttacccaatcttgaa

SEQ ID NO: 16341 - DNA, 20 bp, synthetic construct
  misc_feature 1..20: note = Description of Artificial Sequence: Synthetic oligonucleotide
  misc_feature 1..20: note = Target: ANGPTL4; (+) strand; PAM type: YTN; PAM sequence: TTA
  source 1..20: mol_type = other DNA
cccaatcttgaactcctggg

SEQ ID NO: 16342 - DNA, 20 bp, synthetic construct
  misc_feature 1..20: note = Description of Artificial Sequence: Synthetic oligonucleotide
  misc_feature 1..20: note = Target: ANGPTL4; (+) strand; PAM type: YTN; PAM sequence: CTT
  source 1..20: mol_type = other DNA
gaactcctgggctcaagcag

SEQ ID NO: 16343 - DNA, 20 bp, synthetic construct
  misc_feature 1..20: note = Description of Artificial Sequence: Synthetic oligonucleotide
  misc_feature 1..20: note = Target: ANGPTL4; (+) strand; PAM type: YTN; PAM sequence: TTG
  source 1..20: mol_type = other DNA
aactcctgggctcaagcagt

SEQ ID NO: 16344 - DNA, 20 bp, synthetic construct
  misc_feature 1..20: note = Description of Artificial Sequence: Synthetic oligonucleotide
  misc_feature 1..20: note = Target: ANGPTL4; (+) strand; PAM type: YTN; PAM sequence: CTC
  source 1..20: mol_type = other DNA
ctgggctcaagcagtcctcc

SEQ ID NO: 16345 - DNA, 20 bp, synthetic construct
  misc_feature 1..20: note = Description of Artificial Sequence: Synthetic oligonucleotide
  misc_feature 1..20: note = Target: ANGPTL4; (+) strand; PAM type: YTN; PAM sequence: CTG
  source 1..20: mol_type = other DNA
ggctcaagcagtcctcccac

SEQ ID NO: 16346 - DNA, 20 bp, synthetic construct
  misc_feature 1..20: note = Description of Artificial Sequence: Synthetic oligonucleotide
  misc_feature 1..20: note = Target: ANGPTL4; (+) strand; PAM type: YTN; PAM sequence: CTC
  source 1..20: mol_type = other DNA
aagcagtcctcccaccttgg

SEQ ID NO: 16347 - DNA, 20 bp, synthetic construct
  misc_feature 1..20: note = Description of Artificial Sequence: Synthetic oligonucleotide
  misc_feature 1..20: note = Target: ANGPTL4; (+) strand; PAM type: YTN; PAM sequence: CTC
  source 1..20: mol_type = other DNA
ccaccttggcctcccaaagt

SEQ ID NO: 16348 - DNA, 20 bp, synthetic construct
  misc_feature 1..20: note = Description of Artificial Sequence: Synthetic oligonucleotide
  misc_feature 1..20: note = Target: ANGPTL4; (+) strand; PAM type: YTN; PAM sequence: CTT
  source 1..20: mol_type = other DNA
ggcctcccaaagtactggga

SEQ ID NO: 16349 - DNA, 20 bp, synthetic construct
  misc_feature 1..20: note = Description of Artificial Sequence: Synthetic oligonucleotide
  misc_feature 1..20: note = Target: ANGPTL4; (+) strand; PAM type: YTN; PAM sequence: TTG
  source 1..20: mol_type = other DNA
gcctcccaaagtactgggat

SEQ ID NO: 16350 - DNA, 20 bp, synthetic construct
  misc_feature 1..20: note = Description of Artificial Sequence: Synthetic oligonucleotide
  misc_feature 1..20: note = Target: ANGPTL4; (+) strand; PAM type: YTN; PAM sequence: CTC
  source 1..20: mol_type = other DNA
ccaaagtactgggattacaa

SEQ ID NO: 16351 - DNA, 20 bp, synthetic construct
  misc_feature 1..20: note = Description of Artificial Sequence: Synthetic oligonucleotide
  misc_feature 1..20: note = Target: ANGPTL4; (+) strand; PAM type: YTN; PAM sequence: CTG
  source 1..20: mol_type = other DNA
ggattacaagcatgagccac

SEQ ID NO: 16352 - DNA, 20 bp, synthetic construct
  misc_feature 1..20: note = Description of Artificial Sequence: Synthetic oligonucleotide
  misc_feature 1..20: note = Target: ANGPTL4; (+) strand; PAM type: YTN; PAM sequence: TTA
  source 1..20: mol_type = other DNA
caagcatgagccaccttgcc

SEQ ID NO: 16353 - DNA, 20 bp, synthetic construct
  misc_feature 1..20: note = Description of Artificial Sequence: Synthetic oligonucleotide
  misc_feature 1..20: note = Target: ANGPTL4; (+) strand; PAM type: YTN; PAM sequence: CTT
  source 1..20: mol_type = other DNA
gcctagcttaatggcattta

SEQ ID NO: 16354 - DNA, 20 bp, synthetic construct
  misc_feature 1..20: note = Description of Artificial Sequence: Synthetic oligonucleotide
  misc_feature 1..20: note = Target: ANGPTL4; (+) strand; PAM type: YTN; PAM sequence: TTG
  source 1..20: mol_type = other DNA
cctagcttaatggcatttac

SEQ ID NO: 16355 - DNA, 20 bp, synthetic construct
  misc_feature 1..20: note = Description of Artificial Sequence: Synthetic oligonucleotide
  misc_feature 1..20: note = Target: ANGPTL4; (+) strand; PAM type: YTN; PAM sequence: CTA
  source 1..20: mol_type = other DNA
gcttaatggcatttacattt

SEQ ID NO: 16356 - DNA, 20 bp, synthetic construct
  misc_feature 1..20: note = Description of Artificial Sequence: Synthetic oligonucleotide
  misc_feature 1..20: note = Target: ANGPTL4; (+) strand; PAM type: YTN; PAM sequence: CTT
  source 1..20: mol_type = other DNA
aatggcatttacatttgtag

SEQ ID NO: 16357 - DNA, 20 bp, synthetic construct
  misc_feature 1..20: note = Description of Artificial Sequence: Synthetic oligonucleotide
  misc_feature 1..20: note = Target: ANGPTL4; (+) strand; PAM type: YTN; PAM sequence: TTA
  source 1..20: mol_type = other DNA
atggcatttacatttgtagt

SEQ ID NO: 16358 - DNA, 20 bp, synthetic construct
  misc_feature 1..20: note = Description of Artificial Sequence: Synthetic oligonucleotide
  misc_feature 1..20: note = Target: ANGPTL4; (+) strand; PAM type: YTN; PAM sequence: TTT
  source 1..20: mol_type = other DNA
acatttgtagtgaaatacac

SEQ ID NO: 16359 - DNA, 20 bp, synthetic construct
  misc_feature 1..20: note = Description of Artificial Sequence: Synthetic oligonucleotide
  misc_feature 1..20: note = Target: ANGPTL4; (+) strand; PAM type: YTN; PAM sequence: TTA
  source 1..20: mol_type = other DNA
catttgtagtgaaatacaca

SEQ ID NO: 16360 - DNA, 20 bp, synthetic construct
  misc_feature 1..20: note = Description of Artificial Sequence: Synthetic oligonucleotide
  misc_feature 1..20: note = Target: ANGPTL4; (+) strand; PAM type: YTN; PAM sequence: TTT
  source 1..20: mol_type = other DNA
gtagtgaaatacacataaca

SEQ ID NO: 16361 - DNA, 20 bp, synthetic construct
  misc_feature 1..20: note = Description of Artificial Sequence: Synthetic oligonucleotide
  misc_feature 1..20: note = Target: ANGPTL4; (+) strand; PAM type: YTN; PAM sequence: TTG
  source 1..20: mol_type = other DNA
tagtgaaatacacataacag

SEQ ID NO: 16362 - DNA, 20 bp, synthetic construct
  misc_feature 1..20: note = Description of Artificial Sequence: Synthetic oligonucleotide
  misc_feature 1..20: note = Target: ANGPTL4; (+) strand; PAM type: YTN; PAM sequence: CTG
  source 1..20: mol_type = other DNA
ggcgcagtggctcatacctg

SEQ ID NO: 16363 - DNA, 20 bp, synthetic construct
  misc_feature 1..20: note = Description of Artificial Sequence: Synthetic oligonucleotide
  misc_feature 1..20: note = Target: ANGPTL4; (+) strand; PAM type: YTN; PAM sequence: CTC
  source 1..20: mol_type = other DNA
atacctgtaatcccagcact

SEQ ID NO: 16364 - DNA, 20 bp, synthetic construct
  misc_feature 1..20: note = Description of Artificial Sequence: Synthetic oligonucleotide
  misc_feature 1..20: note = Target: ANGPTL4; (+) strand; PAM type: YTN; PAM sequence: CTG
  source 1..20: mol_type = other DNA
taatcccagcactttgggag

SEQ ID NO: 16365 - DNA, 20 bp, synthetic construct
  misc_feature 1..20: note = Description of Artificial Sequence: Synthetic oligonucleotide
  misc_feature 1..20: note = Target: ANGPTL4; (+) strand; PAM type: YTN; PAM sequence: CTT
  source 1..20: mol_type = other DNA
tgggaggccgaggtaggcgg

SEQ ID NO: 16366 - DNA, 20 bp, synthetic construct
  misc_feature 1..20: note = Description of Artificial Sequence: Synthetic oligonucleotide
  misc_feature 1..20: note = Target: ANGPTL4; (+) strand; PAM type: YTN; PAM sequence: TTT
  source 1..20: mol_type = other DNA
gggaggccgaggtaggcgga

SEQ ID NO: 16367 - DNA, 20 bp, synthetic construct
  misc_feature 1..20: note = Description of Artificial Sequence: Synthetic oligonucleotide
  misc_feature 1..20: note = Target: ANGPTL4; (+) strand; PAM type: YTN; PAM sequence: TTG
  source 1..20: mol_type = other DNA
ggaggccgaggtaggcggat

SEQ ID NO: 16368 - DNA, 20 bp, synthetic construct
  misc_feature 1..20: note = Description of Artificial Sequence: Synthetic oligonucleotide
  misc_feature 1..20: note = Target: ANGPTL4; (+) strand; PAM type: YTN; PAM sequence: CTG
  source 1..20: mol_type = other DNA
aggtcaggagttagagacca

SEQ ID NO: 16369 - DNA, 20 bp, synthetic construct
  misc_feature 1..20: note = Description of Artificial Sequence: Synthetic oligonucleotide
  misc_feature 1..20: note = Target: ANGPTL4; (+) strand; PAM type: YTN; PAM sequence: TTA
  source 1..20: mol_type = other DNA
gagaccagcctggacatggc

SEQ ID NO: 16370 - DNA, 20 bp, synthetic construct
  misc_feature 1..20: note = Description of Artificial Sequence: Synthetic oligonucleotide
  misc_feature 1..20: note = Target: ANGPTL4; (+) strand; PAM type: YTN; PAM sequence: CTG
  source 1..20: mol_type = other DNA
gacatggcgaaaccccgtct

SEQ ID NO: 16371 - DNA, 20 bp, synthetic construct
  misc_feature 1..20: note = Description of Artificial Sequence: Synthetic oligonucleotide
  misc_feature 1..20: note = Target: ANGPTL4; (+) strand; PAM type: YTN; PAM sequence: CTC
  source 1..20: mol_type = other DNA
tactaaaatacaaaaattag

SEQ ID NO: 16372 - DNA, 20 bp, synthetic construct
  misc_feature 1..20: note = Description of Artificial Sequence: Synthetic oligonucleotide
  misc_feature 1..20: note = Target: ANGPTL4; (+) strand; PAM type: YTN; PAM sequence: CTA
  source 1..20: mol_type = other DNA
ctaaaatacaaaaattagcc

SEQ ID NO: 16373 - DNA, 20 bp, synthetic construct
  misc_feature 1..20: note = Description of Artificial Sequence: Synthetic oligonucleotide
  misc_feature 1..20: note = Target: ANGPTL4; (+) strand; PAM type: YTN; PAM sequence: CTA
  source 1..20: mol_type = other DNA
aaatacaaaaattagccagg

SEQ ID NO: 16374 - DNA, 20 bp, synthetic construct
  misc_feature 1..20: note = Description of Artificial Sequence: Synthetic oligonucleotide
  misc_feature 1..20: note = Target: ANGPTL4; (+) strand; PAM type: YTN; PAM sequence: TTA
  source 1..20: mol_type = other DNA
gccaggcgtggtggtgggca

SEQ ID NO: 16375 - DNA, 20 bp, synthetic construct
  misc_feature 1..20: note = Description of Artificial Sequence: Synthetic oligonucleotide
  misc_feature 1..20: note = Target: ANGPTL4; (+) strand; PAM type: YTN; PAM sequence: CTG
  source 1..20: mol_type = other DNA
taatcccagctactcgggag

SEQ ID NO: 16376 - DNA, 20 bp, synthetic construct
  misc_feature 1..20: note = Description of Artificial Sequence: Synthetic oligonucleotide
  misc_feature 1..20: note = Target: ANGPTL4; (+) strand; PAM type: YTN; PAM sequence: CTA
  source 1..20: mol_type = other DNA
ctcgggaggctgaggcagga

SEQ ID NO: 16377 - DNA, 20 bp, synthetic construct
  misc_feature 1..20: note = Description of Artificial Sequence: Synthetic oligonucleotide
  misc_feature 1..20: note = Target: ANGPTL4; (+) strand; PAM type: YTN; PAM sequence: CTC
  source 1..20: mol_type = other DNA
gggaggctgaggcaggagaa

SEQ ID NO: 16378 - DNA, 20 bp, synthetic construct
  misc_feature 1..20: note = Description of Artificial Sequence: Synthetic oligonucleotide
  misc_feature 1..20: note = Target: ANGPTL4; (+) strand; PAM type: YTN; PAM sequence: CTG
  source 1..20: mol_type = other DNA
aggcaggagaatcatttgaa

SEQ ID NO: 16379 - DNA, 20 bp, synthetic construct
  misc_feature 1..20: note = Description of Artificial Sequence: Synthetic oligonucleotide
  misc_feature 1..20: note = Target: ANGPTL4; (+) strand; PAM type: YTN; PAM sequence: TTT
  source 1..20: mol_type = other DNA
gaacccaggaggtggaagtt

SEQ ID NO: 16380 - DNA, 20 bp, synthetic construct
  misc_feature 1..20: note = Description of Artificial Sequence: Synthetic oligonucleotide
  misc_feature 1..20: note = Target: ANGPTL4; (+) strand; PAM type: YTN; PAM sequence: TTG
  source 1..20: mol_type = other DNA
aacccaggaggtggaagttg

SEQ ID NO: 16381 - DNA, 20 bp, synthetic construct
  misc_feature 1..20: note = Description of Artificial Sequence: Synthetic oligonucleotide
  misc_feature 1..20: note = Target: ANGPTL4; (+) strand; PAM type: YTN; PAM sequence: TTG
  source 1..20: mol_type = other DNA
cagtgagcagagattgcacc

SEQ ID NO: 16382 - DNA, 20 bp, synthetic construct
  misc_feature 1..20: note = Description of Artificial Sequence: Synthetic oligonucleotide
  misc_feature 1..20: note = Target: ANGPTL4; (+) strand; PAM type: YTN; PAM sequence: TTG
  source 1..20: mol_type = other DNA
caccactgcactccagcctt

SEQ ID NO: 16383 - DNA, 20 bp, synthetic construct
  misc_feature 1..20: note = Description of Artificial Sequence: Synthetic oligonucleotide
  misc_feature 1..20: note = Target: ANGPTL4; (+) strand; PAM type: YTN; PAM sequence: CTG
  source 1..20: mol_type = other DNA
cactccagccttggcgacag

SEQ ID NO: 16384 - DNA, 20 bp, synthetic construct
  misc_feature 1..20: note = Description of Artificial Sequence: Synthetic oligonucleotide
  misc_feature 1..20: note = Target: ANGPTL4; (+) strand; PAM type: YTN; PAM sequence: CTC
  source 1..20: mol_type = other DNA
cagccttggcgacagagcaa

SEQ ID NO: 16385 - DNA, 20 bp, synthetic construct
  misc_feature 1..20: note = Description of Artificial Sequence: Synthetic oligonucleotide
  misc_feature 1..20: note = Target: ANGPTL4; (+) strand; PAM type: YTN; PAM sequence: CTT
  source 1..20: mol_type = other DNA
ggcgacagagcaagactctg

SEQ ID NO: 16386 - DNA, 20 bp, synthetic construct
  misc_feature 1..20: note = Description of Artificial Sequence: Synthetic oligonucleotide
  misc_feature 1..20: note = Target: ANGPTL4; (+) strand; PAM type: YTN; PAM sequence: TTG
  source 1..20: mol_type = other DNA
gcgacagagcaagactctgt

SEQ ID NO: 16387 - DNA, 20 bp, synthetic construct
  misc_feature 1..20: note = Description of Artificial Sequence: Synthetic oligonucleotide
  misc_feature 1..20: note = Target: ANGPTL4; (+) strand; PAM type: YTN; PAM sequence: CTC
  source 1..20: mol_type = other DNA
tgtctcaaaaaaaagaaaaa

SEQ ID NO: 16388 - DNA, 20 bp, synthetic construct
  misc_feature 1..20: note = Description of Artificial Sequence: Synthetic oligonucleotide
  misc_feature 1..20: note = Target: ANGPTL4; (+) strand; PAM type: YTN; PAM sequence: CTG
  source 1..20: mol_type = other DNA
tctcaaaaaaaagaaaaaaa

SEQ ID NO: 16389 - DNA, 20 bp, synthetic construct
  misc_feature 1..20: note = Description of Artificial Sequence: Synthetic oligonucleotide
  misc_feature 1..20: note = Target: ANGPTL4; (+) strand; PAM type: YTN; PAM sequence: CTC
  source 1..20: mol_type = other DNA
aaaaaaaagaaaaaaaaaag

SEQ ID NO: 16390 - DNA, 20 bp, synthetic construct
  misc_feature 1..20: note = Description of Artificial Sequence: Synthetic oligonucleotide
  misc_feature 1..20: note = Target: ANGPTL4; (+) strand; PAM type: YTN; PAM sequence: TTG
  source 1..20: mol_type = other DNA
gtcattttaacaatttttaa

SEQ ID NO: 16391 - DNA, 20 bp, synthetic construct
  misc_feature 1..20: note = Description of Artificial Sequence: Synthetic oligonucleotide
  misc_feature 1..20: note = Target: ANGPTL4; (+) strand; PAM type: YTN; PAM sequence: TTT
  source 1..20: mol_type = other DNA
taacaatttttaactatgtt

SEQ ID NO: 16392 - DNA, 20 bp, synthetic construct
  misc_feature 1..20: note = Description of Artificial Sequence: Synthetic oligonucleotide
  misc_feature 1..20: note = Target: ANGPTL4; (+) strand; PAM type: YTN; PAM sequence: TTT
  source 1..20: mol_type = other DNA
aacaatttttaactatgttg

SEQ ID NO: 16393 - DNA, 20 bp, synthetic construct
  misc_feature 1..20: note = Description of Artificial Sequence: Synthetic oligonucleotide
  misc_feature 1..20: note = Target: ANGPTL4; (+) strand; PAM type: YTN; PAM sequence: TTA
  source 1..20: mol_type = other DNA
acaatttttaactatgttgg

SEQ ID NO: 16394 - DNA, 20 bp, synthetic construct
  misc_feature 1..20: note = Description of Artificial Sequence: Synthetic oligonucleotide
  misc_feature 1..20: note = Target: ANGPTL4; (+) strand; PAM type: YTN; PAM sequence: TTT
  source 1..20: mol_type = other DNA
ttaactatgttggccaaagt

SEQ ID NO: 16395 - DNA, 20 bp, synthetic construct
  misc_feature 1..20: note = Description of Artificial Sequence: Synthetic oligonucleotide
  misc_feature 1..20: note = Target: ANGPTL4; (+) strand; PAM type: YTN; PAM sequence: TTT
  source 1..20: mol_type = other DNA
taactatgttggccaaagta

SEQ ID NO: 16396 - DNA, 20 bp, synthetic construct
  misc_feature 1..20: note = Description of Artificial Sequence: Synthetic oligonucleotide
  misc_feature 1..20: note = Target: ANGPTL4; (+) strand; PAM type: YTN; PAM sequence: TTT
  source 1..20: mol_type = other DNA
aactatgttggccaaagtag

SEQ ID NO: 16397 - DNA, 20 bp, synthetic construct
  misc_feature 1..20: note = Description of Artificial Sequence: Synthetic oligonucleotide
  misc_feature 1..20: note = Target: ANGPTL4; (+) strand; PAM type: YTN; PAM sequence: TTA
  source 1..20: mol_type = other DNA
actatgttggccaaagtagc

SEQ ID NO: 16398 - DNA, 20 bp, synthetic construct
  misc_feature 1..20: note = Description of Artificial Sequence: Synthetic oligonucleotide
  misc_feature 1..20: note = Target: ANGPTL4; (+) strand; PAM type: YTN; PAM sequence: CTA
  source 1..20: mol_type = other DNA
tgttggccaaagtagcccac

SEQ ID NO: 16399 - DNA, 20 bp, synthetic construct
  misc_feature 1..20: note = Description of Artificial Sequence: Synthetic oligonucleotide
  misc_feature 1..20: note = Target: ANGPTL4; (+) strand; PAM type: YTN; PAM sequence: TTG
  source 1..20: mol_type = other DNA
gccaaagtagcccacgcgtt

SEQ ID NO: 16400 - DNA, 20 bp, synthetic construct
  misc_feature 1..20: note = Description of Artificial Sequence: Synthetic oligonucleotide
  misc_feature 1..20: note = Target: ANGPTL4; (+) strand; PAM type: YTN; PAM sequence: TTG
  source 1..20: mol_type = other DNA
ggattggagacccggtcttg

SEQ ID NO: 16401 - DNA, 20 bp, synthetic construct
  misc_feature 1..20: note = Description of Artificial Sequence: Synthetic oligonucleotide
  misc_feature 1..20: note = Target: ANGPTL4; (+) strand; PAM type: YTN; PAM sequence: TTG
  source 1..20: mol_type = other DNA
gagacccggtcttgcccacc

SEQ ID NO: 16402 - DNA, 20 bp, synthetic construct
  misc_feature 1..20: note = Description of Artificial Sequence: Synthetic oligonucleotide
  misc_feature 1..20: note = Target: ANGPTL4; (+) strand; PAM type: YTN; PAM sequence: CTT
  source 1..20: mol_type = other DNA
gcccaccgtgatcgccccag

SEQ ID NO: 16403 - DNA, 20 bp, synthetic construct
  misc_feature 1..20: note = Description of Artificial Sequence: Synthetic oligonucleotide
  misc_feature 1..20: note = Target: ANGPTL4; (+) strand; PAM type: YTN; PAM sequence: TTG
  source 1..20: mol_type = other DNA
cccaccgtgatcgccccagt

SEQ ID NO: 16404 - DNA, 20 bp, synthetic construct
  misc_feature 1..20: note = Description of Artificial Sequence: Synthetic oligonucleotide
  misc_feature 1..20: note = Target: ANGPTL4; (+) strand; PAM type: YTN; PAM sequence: CTG
  source 1..20: mol_type = other DNA
gcatatagtaggtgctccag

SEQ ID NO: 16405 - DNA, 20 bp, synthetic construct
  misc_feature 1..20: note = Description of Artificial Sequence: Synthetic oligonucleotide
  misc_feature 1..20: note = Target: ANGPTL4; (+) strand; PAM type: YTN; PAM sequence: CTC
  source 1..20: mol_type = other DNA
caggaacaattgatcaggat

SEQ ID NO: 16406 - DNA, 20 bp, synthetic construct
  misc_feature 1..20: note = Description of Artificial Sequence: Synthetic oligonucleotide
  misc_feature 1..20: note = Target: ANGPTL4; (+) strand; PAM type: YTN; PAM sequence: TTG
  source 1..20: mol_type = other DNA
atcaggatgactttgtcttt

SEQ ID NO: 16407 - DNA, 20 bp, synthetic construct
  misc_feature 1..20: note = Description of Artificial Sequence: Synthetic oligonucleotide
  misc_feature 1..20: note = Target: ANGPTL4; (+) strand; PAM type: YTN; PAM sequence: CTT
  source 1..20: mol_type = other DNA
tgtctttgctgggtaagagg

SEQ ID NO: 16408 - DNA, 20 bp, synthetic construct
  misc_feature 1..20: note = Description of Artificial Sequence: Synthetic oligonucleotide
  misc_feature 1..20: note = Target: ANGPTL4; (+) strand; PAM type: YTN; PAM sequence: TTT
  source 1..20: mol_type = other DNA
gtctttgctgggtaagaggc

SEQ ID NO: 16409 - DNA, 20 bp, synthetic construct
  misc_feature 1..20: note = Description of Artificial Sequence: Synthetic oligonucleotide
  misc_feature 1..20: note = Target: ANGPTL4; (+) strand; PAM type: YTN; PAM sequence: TTG
  source 1..20: mol_type = other DNA
tctttgctgggtaagaggcc

SEQ ID NO: 16410 - DNA, 20 bp, synthetic construct
  misc_feature 1..20: note = Description of Artificial Sequence: Synthetic oligonucleotide
  misc_feature 1..20: note = Target: ANGPTL4; (+) strand; PAM type: YTN; PAM sequence: CTT
  source 1..20: mol_type = other DNA
tgctgggtaagaggccacat

SEQ ID NO: 16411 - DNA, 20 bp, synthetic construct
  misc_feature 1..20: note = Description of Artificial Sequence: Synthetic oligonucleotide
  misc_feature 1..20: note = Target: ANGPTL4; (+) strand; PAM type: YTN; PAM sequence: TTT
  source 1..20: mol_type = other DNA
gctgggtaagaggccacatt

SEQ ID NO: 16412 - DNA, 20 bp, synthetic construct
  misc_feature 1..20: note = Description of Artificial Sequence: Synthetic oligonucleotide
  misc_feature 1..20: note = Target: ANGPTL4; (+) strand; PAM type: YTN; PAM sequence: TTG
  source 1..20: mol_type = other DNA
ctgggtaagaggccacattc

SEQ ID NO: 16413 - DNA, 20 bp, synthetic construct
  misc_feature 1..20: note = Description of Artificial Sequence: Synthetic oligonucleotide
  misc_feature 1..20: note = Target: ANGPTL4; (+) strand; PAM type: YTN; PAM sequence: CTG
  source 1..20: mol_type = other DNA
ggtaagaggccacattctaa

SEQ ID NO: 16414 - DNA, 20 bp, synthetic construct
  misc_feature 1..20: note = Description of Artificial Sequence: Synthetic oligonucleotide
  misc_feature 1..20: note = Target: ANGPTL4; (+) strand; PAM type: YTN; PAM sequence: TTC
  source 1..20: mol_type = other DNA
taaaggtcagtttttggcca

SEQ ID NO: 16415 - DNA, 20 bp, synthetic construct
  misc_feature 1..20: note = Description of Artificial Sequence: Synthetic oligonucleotide
  misc_feature 1..20: note = Target: ANGPTL4; (+) strand; PAM type: YTN; PAM sequence: CTA
  source 1..20: mol_type = other DNA
aaggtcagtttttggccagg

SEQ ID NO: 16416 - DNA, 20 bp, synthetic construct
  misc_feature 1..20: note = Description of Artificial Sequence: Synthetic oligonucleotide
  misc_feature 1..20: note = Target: ANGPTL4; (+) strand; PAM type: YTN; PAM sequence: TTT
  source 1..20: mol_type = other DNA
ttggccaggcacagtgactc

SEQ ID NO: 16417 - DNA, 20 bp, synthetic construct
  misc_feature 1..20: note = Description of Artificial Sequence: Synthetic oligonucleotide
  misc_feature 1..20: note = Target: ANGPTL4; (+) strand; PAM type: YTN; PAM sequence: TTT
  source 1..20: mol_type = other DNA
tggccaggcacagtgactca

SEQ ID NO: 16418 - DNA, 20 bp, synthetic construct
  misc_feature 1..20: note = Description of Artificial Sequence: Synthetic oligonucleotide
  misc_feature 1..20: note = Target: ANGPTL4; (+) strand; PAM type: YTN; PAM sequence: TTT
  source 1..20: mol_type = other DNA
ggccaggcacagtgactcac

SEQ ID NO: 16419 - DNA, 20 bp, synthetic construct
  misc_feature 1..20: note = Description of Artificial Sequence: Synthetic oligonucleotide
  misc_feature 1..20: note = Target: ANGPTL4; (+) strand; PAM type: YTN; PAM sequence: TTG
  source 1..20: mol_type = other DNA
gccaggcacagtgactcaca

SEQ ID NO: 16420 - DNA, 20 bp, synthetic construct
  misc_feature 1..20: note = Description of Artificial Sequence: Synthetic oligonucleotide
  misc_feature 1..20: note = Target: ANGPTL4; (+) strand; PAM type: YTN; PAM sequence: CTC
  source 1..20: mol_type = other DNA
acacctgtcatcccagcact

SEQ ID NO: 16421 - DNA, 20 bp, synthetic construct
  misc_feature 1..20: note = Description of Artificial Sequence: Synthetic oligonucleotide
  misc_feature 1..20: note = Target: ANGPTL4; (+) strand; PAM type: YTN; PAM sequence: CTG
  source 1..20: mol_type = other DNA
tcatcccagcactttgggag

SEQ ID NO: 16422 - DNA, 20 bp, synthetic construct
  misc_feature 1..20: note = Description of Artificial Sequence: Synthetic oligonucleotide
  misc_feature 1..20: note = Target: ANGPTL4; (+) strand; PAM type: YTN; PAM sequence: CTT
  source 1..20: mol_type = other DNA
tgggaggccgaggcgagtga

SEQ ID NO: 16423 - DNA, 20 bp, synthetic construct
  misc_feature 1..20: note = Description of Artificial Sequence: Synthetic oligonucleotide
  misc_feature 1..20: note = Target: ANGPTL4; (+) strand; PAM type: YTN; PAM sequence: TTT
  source 1..20: mol_type = other DNA
gggaggccgaggcgagtgaa

SEQ ID NO: 16424 - DNA, 20 bp, synthetic construct
  misc_feature 1..20: note = Description of Artificial Sequence: Synthetic oligonucleotide
  misc_feature 1..20: note = Target: ANGPTL4; (+) strand; PAM type: YTN; PAM sequence: TTG
  source 1..20: mol_type = other DNA
ggaggccgaggcgagtgaat

SEQ ID NO: 16425 - DNA, 20 bp, synthetic construct
  misc_feature 1..20: note = Description of Artificial Sequence: Synthetic oligonucleotide
  misc_feature 1..20: note = Target: ANGPTL4; (+) strand; PAM type: YTN; PAM sequence: CTT
  source 1..20: mol_type = other DNA
gagctcaggagttcaagacc

SEQ ID NO: 16426 - DNA, 20 bp, synthetic construct
  misc_feature 1..20: note = Description of Artificial Sequence: Synthetic oligonucleotide
  misc_feature 1..20: note = Target: ANGPTL4; (+) strand; PAM type: YTN; PAM sequence: TTG
  source 1..20: mol_type = other DNA
agctcaggagttcaagacca

SEQ ID NO: 16427 - DNA, 20 bp, synthetic construct
  misc_feature 1..20: note = Description of Artificial Sequence: Synthetic oligonucleotide
  misc_feature 1..20: note = Target: ANGPTL4; (+) strand; PAM type: YTN; PAM sequence: CTC
  source 1..20: mol_type = other DNA
aggagttcaagaccagcctg

SEQ ID NO: 16428 - DNA, 20 bp, synthetic construct
  misc_feature 1..20: note = Description of Artificial Sequence: Synthetic oligonucleotide
  misc_feature 1..20: note = Target: ANGPTL4; (+) strand; PAM type: YTN; PAM sequence: TTC
  source 1..20: mol_type = other DNA
aagaccagcctgggcaacac

SEQ ID NO: 16429 - DNA, 20 bp, synthetic construct
  misc_feature 1..20: note = Description of Artificial Sequence: Synthetic oligonucleotide
  misc_feature 1..20: note = Target: ANGPTL4; (+) strand; PAM type: YTN; PAM sequence: CTG
  source 1..20: mol_type = other DNA
ggcaacacggcaaaaatcct

SEQ ID NO: 16430 - DNA, 20 bp, synthetic construct
  misc_feature 1..20: note = Description of Artificial Sequence: Synthetic oligonucleotide
  misc_feature 1..20: note = Target: ANGPTL4; (+) strand; PAM type: YTN; PAM sequence: CTG
  source 1..20: mol_type = other DNA
tctctacaaaatctacagaa

SEQ ID NO: 16431 - DNA, 20 bp, synthetic construct
  misc_feature 1..20: note = Description of Artificial Sequence: Synthetic oligonucleotide
  misc_feature 1..20: note = Target: ANGPTL4; (+) strand; PAM type: YTN; PAM sequence: CTC
  source 1..20: mol_type = other DNA
tacaaaatctacagaaatta

SEQ ID NO: 16432 - DNA, 20 bp, synthetic construct
  misc_feature 1..20: note = Description of Artificial Sequence: Synthetic oligonucleotide
  misc_feature 1..20: note = Target: ANGPTL4; (+) strand; PAM type: YTN; PAM sequence: CTA
  source 1..20: mol_type = other DNA
caaaatctacagaaattagg

SEQ ID NO: 16433 - DNA, 20 bp, synthetic construct
  misc_feature 1..20: note = Description of Artificial Sequence: Synthetic oligonucleotide
  misc_feature 1..20: note = Target: ANGPTL4; (+) strand; PAM type: YTN; PAM sequence: CTA
  source 1..20: mol_type = other DNA
cagaaattaggcaggtctgg

SEQ ID NO: 16434 - DNA, 20 bp, synthetic construct
  misc_feature 1..20: note = Description of Artificial Sequence: Synthetic oligonucleotide
  misc_feature 1..20: note = Target: ANGPTL4; (+) strand; PAM type: YTN; PAM sequence: TTA
  source 1..20: mol_type = other DNA
ggcaggtctggtggcacatg

SEQ ID NO: 16435 - DNA, 20 bp, synthetic construct
  misc_feature 1..20: note = Description of Artificial Sequence: Synthetic oligonucleotide
  misc_feature 1..20: note = Target: ANGPTL4; (+) strand; PAM type: YTN; PAM sequence: CTG
  source 1..20: mol_type = other DNA
gtggcacatgcctatagtcc

SEQ ID NO: 16436 - DNA, 20 bp, synthetic construct
  misc_feature 1..20: note = Description of Artificial Sequence: Synthetic oligonucleotide
  misc_feature 1..20: note = Target: ANGPTL4; (+) strand; PAM type: YTN; PAM sequence: CTA
  source 1..20: mol_type = other DNA
tagtcccagctgcttgggag

SEQ ID NO: 16437 - DNA, 20 bp, synthetic construct
  misc_feature 1..20: note = Description of Artificial Sequence: Synthetic oligonucleotide
  misc_feature 1..20: note = Target: ANGPTL4; (+) strand; PAM type: YTN; PAM sequence: CTG
  source 1..20: mol_type = other DNA
cttgggaggctgaggtggga

SEQ ID NO: 16438 - DNA, 20 bp, synthetic construct
  misc_feature 1..20: note = Description of Artificial Sequence: Synthetic oligonucleotide
  misc_feature 1..20: note = Target: ANGPTL4; (+) strand; PAM type: YTN; PAM sequence: CTT
  source 1..20: mol_type = other DNA
gggaggctgaggtgggagga

SEQ ID NO: 16439 - DNA, 20 bp, synthetic construct
  misc_feature 1..20: note = Description of Artificial Sequence: Synthetic oligonucleotide
  misc_feature 1..20: note = Target: ANGPTL4; (+) strand; PAM type: YTN; PAM sequence: TTG
  source 1..20: mol_type = other DNA
ggaggctgaggtgggaggat

SEQ ID NO: 16440 - DNA, 20 bp, synthetic construct
  misc_feature 1..20: note = Description of Artificial Sequence: Synthetic oligonucleotide
  misc_feature 1..20: note = Target: ANGPTL4; (+) strand; PAM type: YTN; PAM sequence: CTG
  source 1..20: mol_type = other DNA
aggtgggaggatcacttgag

SEQ ID NO: 16441 - DNA, 20 bp, synthetic construct
  misc_feature 1..20: note = Description of Artificial Sequence: Synthetic oligonucleotide
  misc_feature 1..20: note = Target: ANGPTL4; (+) strand; PAM type: YTN; PAM sequence: CTT
  source 1..20: mol_type = other DNA
gagcctgggagtttgaggtt

SEQ ID NO: 16442 - DNA, 20 bp, synthetic construct
  misc_feature 1..20: note = Description of Artificial Sequence: Synthetic oligonucleotide
  misc_feature 1..20: note = Target: ANGPTL4; (+) strand; PAM type: YTN; PAM sequence: TTG
  source 1..20: mol_type = other DNA
agcctgggagtttgaggttg

SEQ ID NO: 16443 - DNA, 20 bp, synthetic construct
  misc_feature 1..20: note = Description of Artificial Sequence: Synthetic oligonucleotide
  misc_feature 1..20: note = Target: ANGPTL4; (+) strand; PAM type: YTN; PAM sequence: CTG
  source 1..20: mol_type = other DNA
ggagtttgaggttgcggtga

SEQ ID NO: 16444 - DNA, 20 bp, synthetic construct
  misc_feature 1..20: note = Description of Artificial Sequence: Synthetic oligonucleotide
  misc_feature 1..20: note = Target: ANGPTL4; (+) strand; PAM type: YTN; PAM sequence: TTT
  source 1..20: mol_type = other DNA
gaggttgcggtgagctgtga

SEQ ID NO: 16445 - DNA, 20 bp, synthetic construct
  misc_feature 1..20: note = Description of Artificial Sequence: Synthetic oligonucleotide
  misc_feature 1..20: note = Target: ANGPTL4; (+) strand; PAM type: YTN; PAM sequence: TTG
  source 1..20: mol_type = other DNA
aggttgcggtgagctgtgat

SEQ ID NO: 16446 - DNA, 20 bp, synthetic construct
  misc_feature 1..20: note = Description of Artificial Sequence: Synthetic oligonucleotide
  misc_feature 1..20: note = Target: ANGPTL4; (+) strand; PAM type: YTN; PAM sequence: TTG
  source 1..20: mol_type = other DNA
cggtgagctgtgattgtgac

SEQ ID NO: 16447 - DNA, 20 bp, synthetic construct
  misc_feature 1..20: note = Description of Artificial Sequence: Synthetic oligonucleotide
  misc_feature 1..20: note = Target: ANGPTL4; (+) strand; PAM type: YTN; PAM sequence: CTG
  source 1..20: mol_type = other DNA
tgattgtgacactgcactcc

SEQ ID NO: 16448 - DNA, 20 bp, synthetic construct
  misc_feature 1..20: note = Description of Artificial Sequence: Synthetic oligonucleotide
  misc_feature 1..20: note = Target: ANGPTL4; (+) strand; PAM type: YTN; PAM sequence: TTG
  source 1..20: mol_type = other DNA
tgacactgcactccagcctg

SEQ ID NO: 16449 - DNA, 20 bp, synthetic construct
  misc_feature 1..20: note = Description of Artificial Sequence: Synthetic oligonucleotide
  misc_feature 1..20: note = Target: ANGPTL4; (+) strand; PAM type: YTN; PAM sequence: CTG
  source 1..20: mol_type = other DNA
cactccagcctgggtgagtg

SEQ ID NO: 16450 - DNA, 20 bp, synthetic construct
  misc_feature 1..20: note = Description of Artificial Sequence: Synthetic oligonucleotide
  misc_feature 1..20: note = Target: ANGPTL4; (+) strand; PAM type: YTN; PAM sequence: CTC
  source 1..20: mol_type = other DNA
cagcctgggtgagtgagacc

SEQ ID NO: 16451 - DNA, 20 bp, synthetic construct
  misc_feature 1..20: note = Description of Artificial Sequence: Synthetic oligonucleotide
  misc_feature 1..20: note = Target: ANGPTL4; (+) strand; PAM type: YTN; PAM sequence: CTG
  source 1..20: mol_type = other DNA
ggtgagtgagacccatctca

SEQ ID NO: 16452 - DNA, 20 bp, synthetic construct
  misc_feature 1..20: note = Description of Artificial Sequence: Synthetic oligonucleotide
  misc_feature 1..20: note = Target: ANGPTL4; (+) strand; PAM type: YTN; PAM sequence: CTC
  source 1..20: mol_type = other DNA
agaaaaaaaaaaaaaaatac

SEQ ID NO: 16453 - DNA, 20 bp, synthetic construct
  misc_feature 1..20: note = Description of Artificial Sequence: Synthetic oligonucleotide
  misc_feature 1..20: note = Target: ANGPTL4; (+) strand; PAM type: YTN; PAM sequence: CTG
  source 1..20: mol_type = other DNA
ggcgtggtggctcatgcctg

SEQ ID NO: 16454 - DNA, 20 bp, synthetic construct
  misc_feature 1..20: note = Description of Artificial Sequence: Synthetic oligonucleotide
  misc_feature 1..20: note = Target: ANGPTL4; (+) strand; PAM type: YTN; PAM sequence: CTC
  source 1..20: mol_type = other DNA
atgcctgtaatcctagcact

SEQ ID NO: 16455 - DNA, 20 bp, synthetic construct
  misc_feature 1..20: note = Description of Artificial Sequence: Synthetic oligonucleotide
  misc_feature 1..20: note = Target: ANGPTL4; (+) strand; PAM type: YTN; PAM sequence: CTG
  source 1..20: mol_type = other DNA
taatcctagcactttgggag

SEQ ID NO: 16456 - DNA, 20 bp, synthetic construct
  misc_feature 1..20: note = Description of Artificial Sequence: Synthetic oligonucleotide
  misc_feature 1..20: note = Target: ANGPTL4; (+) strand; PAM type: YTN; PAM sequence: CTA
  source 1..20: mol_type = other DNA
gcactttgggaggctgaggt

SEQ ID NO: 16457 - DNA, 20 bp, synthetic construct
  misc_feature 1..20: note = Description of Artificial Sequence: Synthetic oligonucleotide
  misc_feature 1..20: note = Target: ANGPTL4; (+) strand; PAM type: YTN; PAM sequence: CTT
  source 1..20: mol_type = other DNA
tgggaggctgaggtggtgga

SEQ ID NO: 16458 - DNA, 20 bp, synthetic construct
  misc_feature 1..20: note = Description of Artificial Sequence: Synthetic oligonucleotide
  misc_feature 1..20: note = Target: ANGPTL4; (+) strand; PAM type: YTN; PAM sequence: TTT
  source 1..20: mol_type = other DNA
gggaggctgaggtggtggat

SEQ ID NO: 16459 - DNA, 20 bp, synthetic construct
  misc_feature 1..20: note = Description of Artificial Sequence: Synthetic oligonucleotide
  misc_feature 1..20: note = Target: ANGPTL4; (+) strand; PAM type: YTN; PAM sequence: TTG
  source 1..20: mol_type = other DNA
ggaggctgaggtggtggata

SEQ ID NO: 16460 - DNA, 20 bp, synthetic construct
  misc_feature 1..20: note = Description of Artificial Sequence: Synthetic oligonucleotide
  misc_feature 1..20: note = Target: ANGPTL4; (+) strand; PAM type: YTN; PAM sequence: CTG
  source 1..20: mol_type = other DNA
aggtggtggatagcctaagc

SEQ ID NO: 16461 - DNA, 20 bp, synthetic construct
  misc_feature 1..20: note = Description of Artificial Sequence: Synthetic oligonucleotide
  misc_feature 1..20: note = Target: ANGPTL4; (+) strand; PAM type: YTN; PAM sequence: CTA
  source 1..20: mol_type = other DNA
agcttaggagtttgagacca

SEQ ID NO: 16462 - DNA, 20 bp, synthetic construct
  misc_feature 1..20: note = Description of Artificial Sequence: Synthetic oligonucleotide
  misc_feature 1..20: note = Target: ANGPTL4; (+) strand; PAM type: YTN; PAM sequence: CTT
  source 1..20: mol_type = other DNA
aggagtttgagaccagcctg

SEQ ID NO: 16463 - DNA, 20 bp, synthetic construct
  misc_feature 1..20: note = Description of Artificial Sequence: Synthetic oligonucleotide
  misc_feature 1..20: note = Target: ANGPTL4; (+) strand; PAM type: YTN; PAM sequence: TTA
  source 1..20: mol_type = other DNA
ggagtttgagaccagcctgg

SEQ ID NO: 16464 - DNA, 20 bp, synthetic construct
  misc_feature 1..20: note = Description of Artificial Sequence: Synthetic oligonucleotide
  misc_feature 1..20: note = Target: ANGPTL4; (+) strand; PAM type: YTN; PAM sequence: TTT
  source 1..20: mol_type = other DNA
gagaccagcctgggcaacat

SEQ ID NO: 16465 - DNA, 20 bp, synthetic construct
  misc_feature 1..20: note = Description of Artificial Sequence: Synthetic oligonucleotide
  misc_feature 1..20: note = Target: ANGPTL4; (+) strand; PAM type: YTN; PAM sequence: TTG
  source 1..20: mol_type = other DNA
agaccagcctgggcaacatg

SEQ ID NO: 16466 - DNA, 20 bp, synthetic construct
  misc_feature 1..20: note = Description of Artificial Sequence: Synthetic oligonucleotide
  misc_feature 1..20: note = Target: ANGPTL4; (+) strand; PAM type: YTN; PAM sequence: CTG
  source 1..20: mol_type = other DNA
ggcaacatggcgaaacccca

SEQ ID NO: 16467 - DNA, 20 bp, synthetic construct
  misc_feature 1..20: note = Description of Artificial Sequence: Synthetic oligonucleotide
  misc_feature 1..20: note = Target: ANGPTL4; (+) strand; PAM type: YTN; PAM sequence: CTC
  source 1..20: mol_type = other DNA
tactagaatacaaaaaatta

SEQ ID NO: 16468 - DNA, 20 bp, synthetic construct
  misc_feature 1..20: note = Description of Artificial Sequence: Synthetic oligonucleotide
  misc_feature 1..20: note = Target: ANGPTL4; (+) strand; PAM type: YTN; PAM sequence: CTA
  source 1..20: mol_type = other DNA
ctagaatacaaaaaattagc

SEQ ID NO: 16469 - DNA, 20 bp, synthetic construct
  misc_feature 1..20: note = Description of Artificial Sequence: Synthetic oligonucleotide
  misc_feature 1..20: note = Target: ANGPTL4; (+) strand; PAM type: YTN; PAM sequence: CTA
  source 1..20: mol_type = other DNA
gaatacaaaaaattagcggg

SEQ ID NO: 16470 - DNA, 20 bp, synthetic construct
  misc_feature 1..20: note = Description of Artificial Sequence: Synthetic oligonucleotide
  misc_feature 1..20: note = Target: ANGPTL4; (+) strand; PAM type: YTN; PAM sequence: TTA
  source 1..20: mol_type = other DNA
gcgggcgtggtggtgggcac

SEQ ID NO: 16471 - DNA, 20 bp, synthetic construct
  misc_feature 1..20: note = Description of Artificial Sequence: Synthetic oligonucleotide
  misc_feature 1..20: note = Target: ANGPTL4; (+) strand; PAM type: YTN; PAM sequence: CTG
  source 1..20: mol_type = other DNA
tagtcccagctactcaggag

SEQ ID NO: 16472 - DNA, 20 bp, synthetic construct
  misc_feature 1..20: note = Description of Artificial Sequence: Synthetic oligonucleotide
  misc_feature 1..20: note = Target: ANGPTL4; (+) strand; PAM type: YTN; PAM sequence: CTA
  source 1..20: mol_type = other DNA
ctcaggaggctgaggcagga

SEQ ID NO: 16473 - DNA, 20 bp, synthetic construct
  misc_feature 1..20: note = Description of Artificial Sequence: Synthetic oligonucleotide
  misc_feature 1..20: note = Target: ANGPTL4; (+) strand; PAM type: YTN; PAM sequence: CTC
  source 1..20: mol_type = other DNA
aggaggctgaggcaggagaa

SEQ ID NO: 16474 - DNA, 20 bp, synthetic construct
  misc_feature 1..20: note = Description of Artificial Sequence: Synthetic oligonucleotide
  misc_feature 1..20: note = Target: ANGPTL4; (+) strand; PAM type: YTN; PAM sequence: CTG
  source 1..20: mol_type = other DNA
aggcaggagaatggcgggaa

SEQ ID NO: 16475 - DNA, 20 bp, synthetic construct
  misc_feature 1..20: note = Description of Artificial Sequence: Synthetic oligonucleotide
  misc_feature 1..20: note = Target: ANGPTL4; (+) strand; PAM type: YTN; PAM sequence: CTG
  source 1..20: mol_type = other DNA
ggaggtggagcttgcagtga

SEQ ID NO: 16476 - DNA, 20 bp, synthetic construct
  misc_feature 1..20: note = Description of Artificial Sequence: Synthetic oligonucleotide
  misc_feature 1..20: note = Target: ANGPTL4; (+) strand; PAM type: YTN; PAM sequence: CTT
  source 1..20: mol_type = other DNA
gcagtgagccgagatgaggc

SEQ ID NO: 16477 - DNA, 20 bp, synthetic construct
  misc_feature 1..20: note = Description of Artificial Sequence: Synthetic oligonucleotide
  misc_feature 1..20: note = Target: ANGPTL4; (+) strand; PAM type: YTN; PAM sequence: TTG
  source 1..20: mol_type = other DNA
cagtgagccgagatgaggcc

SEQ ID NO: 16478 - DNA, 20 bp, synthetic construct
  misc_feature 1..20: note = Description of Artificial Sequence: Synthetic oligonucleotide
  misc_feature 1..20: note = Target: ANGPTL4; (+) strand; PAM type: YTN; PAM sequence: CTG
  source 1..20: mol_type = other DNA
cactccagcctgggcaacag

SEQ ID NO: 16479 - DNA, 20 bp, synthetic construct
  misc_feature 1..20: note = Description of Artificial Sequence: Synthetic oligonucleotide
  misc_feature 1..20: note = Target: ANGPTL4; (+) strand; PAM type: YTN; PAM sequence: CTC
  source 1..20: mol_type = other DNA
cagcctgggcaacagagcaa

SEQ ID NO: 16480 - DNA, 20 bp, synthetic construct
  misc_feature 1..20: note = Description of Artificial Sequence: Synthetic oligonucleotide
  misc_feature 1..20: note = Target: ANGPTL4; (+) strand; PAM type: YTN; PAM sequence: CTG
  source 1..20: mol_type = other DNA
ggcaacagagcaagactctg

SEQ ID NO: 16481 - DNA, 20 bp, synthetic construct
  misc_feature 1..20: note = Description of Artificial Sequence: Synthetic oligonucleotide
  misc_feature 1..20: note = Target: ANGPTL4; (+) strand; PAM type: YTN; PAM sequence: CTC
  source 1..20: mol_type = other DNA
tgtctcaaaaaaaaaaaaaa

SEQ ID NO: 16482 - DNA, 20 bp, synthetic construct
  misc_feature 1..20: note = Description of Artificial Sequence: Synthetic oligonucleotide
  misc_feature 1..20: note = Target: ANGPTL4; (+) strand; PAM type: YTN; PAM sequence: CTG
  source 1..20: mol_type = other DNA
tctcaaaaaaaaaaaaaaaa

SEQ ID NO: 16483 - DNA, 20 bp, synthetic construct
  misc_feature 1..20: note = Description of Artificial Sequence: Synthetic oligonucleotide
  misc_feature 1..20: note = Target: ANGPTL4; (+) strand; PAM type: YTN; PAM sequence: CTC
  source 1..20: mol_type = other DNA
aaaaaaaaaaaaaaaaaaaa

SEQ ID NO: 16484 - DNA, 20 bp, synthetic construct
  misc_feature 1..20: note = Description of Artificial Sequence: Synthetic oligonucleotide
  misc_feature 1..20: note = Target: ANGPTL4; (+) strand; PAM type: YTN; PAM sequence: CTA
  source 1..20: mol_type = other DNA
ggccaggcacagtggctcac

SEQ ID NO: 16485 - DNA, 20 bp, synthetic construct
  misc_feature 1..20: note = Description of Artificial Sequence: Synthetic oligonucleotide
  misc_feature 1..20: note = Target: ANGPTL4; (+) strand; PAM type: YTN; PAM sequence: CTC
  source 1..20: mol_type = other DNA
acacctgtaatcccagcacg

SEQ ID NO: 16486 - DNA, 20 bp, synthetic construct
  misc_feature 1..20: note = Description of Artificial Sequence: Synthetic oligonucleotide
  misc_feature 1..20: note = Target: ANGPTL4; (+) strand; PAM type: YTN; PAM sequence: CTG
  source 1..20: mol_type = other DNA
taatcccagcacgttgggag

SEQ ID NO: 16487 - DNA, 20 bp, synthetic construct
  misc_feature 1..20: note = Description of Artificial Sequence: Synthetic oligonucleotide
  misc_feature 1..20: note = Target: ANGPTL4; (+) strand; PAM type: YTN; PAM sequence: TTG
  source 1..20: mol_type = other DNA
ggaggccgagacaggtggat

SEQ ID NO: 16488 - DNA, 20 bp, synthetic construct
  misc_feature 1..20: note = Description of Artificial Sequence: Synthetic oligonucleotide
  misc_feature 1..20: note = Target: ANGPTL4; (+) strand; PAM type: YTN; PAM sequence: CTG
  source 1..20: mol_type = other DNA
aggtcaggaatttgagacca

SEQ ID NO: 16489 - DNA, 20 bp, synthetic construct
  misc_feature 1..20: note = Description of Artificial Sequence: Synthetic oligonucleotide
  misc_feature 1..20: note = Target: ANGPTL4; (+) strand; PAM type: YTN; PAM sequence: TTT
  source 1..20: mol_type = other DNA
gagaccagcagagccaacat

SEQ ID NO: 16490 - DNA, 20 bp, synthetic construct
  misc_feature 1..20: note = Description of Artificial Sequence: Synthetic oligonucleotide
  misc_feature 1..20: note = Target: ANGPTL4; (+) strand; PAM type: YTN; PAM sequence: TTG
  source 1..20: mol_type = other DNA
agaccagcagagccaacata

SEQ ID NO: 16491 - DNA, 20 bp, synthetic construct
  misc_feature 1..20: note = Description of Artificial Sequence: Synthetic oligonucleotide
  misc_feature 1..20: note = Target: ANGPTL4; (+) strand; PAM type: YTN; PAM sequence: TTT
  source 1..20: mol_type = other DNA
gcactaaaaatacaaaaaat

SEQ ID NO: 16492 - DNA, 20 bp, synthetic construct
  misc_feature 1..20: note = Description of Artificial Sequence: Synthetic oligonucleotide
  misc_feature 1..20: note = Target: ANGPTL4; (+) strand; PAM type: YTN; PAM sequence: TTG
  source 1..20: mol_type = other DNA
cactaaaaatacaaaaaatt

SEQ ID NO: 16493 - DNA, 20 bp, synthetic construct
  misc_feature 1..20: note = Description of Artificial Sequence: Synthetic oligonucleotide
  misc_feature 1..20: note = Target: ANGPTL4; (+) strand; PAM type: YTN; PAM sequence: CTA
  source 1..20: mol_type = other DNA
aaaatacaaaaaattagtca

SEQ ID NO: 16494 - DNA, 20 bp, synthetic construct
  misc_feature 1..20: note = Description of Artificial Sequence: Synthetic oligonucleotide
  misc_feature 1..20: note = Target: ANGPTL4; (+) strand; PAM type: YTN; PAM sequence: TTA
  source 1..20: mol_type = other DNA
gtcaggtgtggtggtgcaca

SEQ ID NO: 16495 - DNA, 20 bp, synthetic construct
  misc_feature 1..20: note = Description of Artificial Sequence: Synthetic oligonucleotide
  misc_feature 1..20: note = Target: ANGPTL4; (+) strand; PAM type: YTN; PAM sequence: CTG
  source 1..20: mol_type = other DNA
taatccccgctactcgggag

SEQ ID NO: 16496 - DNA, 20 bp, synthetic construct
  misc_feature 1..20: note = Description of Artificial Sequence: Synthetic oligonucleotide
  misc_feature 1..20: note = Target: ANGPTL4; (+) strand; PAM type: YTN; PAM sequence: CTA
  source 1..20: mol_type = other DNA
ctcgggaggctgaggctgga

SEQ ID NO: 16497 - DNA, 20 bp, synthetic construct
  misc_feature 1..20: note = Description of Artificial Sequence: Synthetic oligonucleotide
  misc_feature 1..20: note = Target: ANGPTL4; (+) strand; PAM type: YTN; PAM sequence: CTC
  source 1..20: mol_type = other DNA
gggaggctgaggctggagaa

SEQ ID NO: 16498 - DNA, 20 bp, synthetic construct
  misc_feature 1..20: note = Description of Artificial Sequence: Synthetic oligonucleotide
  misc_feature 1..20: note = Target: ANGPTL4; (+) strand; PAM type: YTN; PAM sequence: CTG
  source 1..20: mol_type = other DNA
aggctggagaatcgcttgaa

SEQ ID NO: 16499 - DNA, 20 bp, synthetic construct
  misc_feature 1..20: note = Description of Artificial Sequence: Synthetic oligonucleotide
  misc_feature 1..20: note = Target: ANGPTL4; (+) strand; PAM type: YTN; PAM sequence: CTG
  source 1..20: mol_type = other DNA
gagaatcgcttgaacctggg

SEQ ID NO: 16500 - DNA, 20 bp, synthetic construct
  misc_feature 1..20: note = Description of Artificial Sequence: Synthetic oligonucleotide
  misc_feature 1..20: note = Target: ANGPTL4; (+) strand; PAM type: YTN; PAM sequence: CTT
  source 1..20: mol_type = other DNA
gaacctgggaggcagaggtt

SEQ ID NO: 16501 - DNA, 20 bp, synthetic construct
  misc_feature 1..20: note = Description of Artificial Sequence: Synthetic oligonucleotide
  misc_feature 1..20: note = Target: ANGPTL4; (+) strand; PAM type: YTN; PAM sequence: TTG
  source 1..20: mol_type = other DNA
aacctgggaggcagaggttg

SEQ ID NO: 16502 - DNA, 20 bp, synthetic construct
  misc_feature 1..20: note = Description of Artificial Sequence: Synthetic oligonucleotide
  misc_feature 1..20: note = Target: ANGPTL4; (+) strand; PAM type: YTN; PAM sequence: CTG
  source 1..20: mol_type = other DNA
ggaggcagaggttgcagtga

SEQ ID NO: 16503 - DNA, 20 bp, synthetic construct
  misc_feature 1..20: note = Description of Artificial Sequence: Synthetic oligonucleotide
  misc_feature 1..20: note = Target: ANGPTL4; (+) strand; PAM type: YTN; PAM sequence: TTG
  source 1..20: mol_type = other DNA
cagtgagcggagattgcgcc

SEQ ID NO: 16504 - DNA, 20 bp, synthetic construct
  misc_feature 1..20: note = Description of Artificial Sequence: Synthetic oligonucleotide
  misc_feature 1..20: note = Target: ANGPTL4; (+) strand; PAM type: YTN; PAM sequence: TTG
  source 1..20: mol_type = other DNA
cgccgttgcactccagcctg

SEQ ID NO: 16505 - DNA, 20 bp, synthetic construct
  misc_feature 1..20: note = Description of Artificial Sequence: Synthetic oligonucleotide
  misc_feature 1..20: note = Target: ANGPTL4; (+) strand; PAM type: YTN; PAM sequence: TTG
  source 1..20: mol_type = other DNA
cactccagcctgggcgacaa

SEQ ID NO: 16506 - DNA, 20 bp, synthetic construct
  misc_feature 1..20: note = Description of Artificial Sequence: Synthetic oligonucleotide
  misc_feature 1..20: note = Target: ANGPTL4; (+) strand; PAM type: YTN; PAM sequence: CTC
  source 1..20: mol_type = other DNA
cagcctgggcgacaagaggg

SEQ ID NO: 16507 - DNA, 20 bp, synthetic construct
  misc_feature 1..20: note = Description of Artificial Sequence: Synthetic oligonucleotide
  misc_feature 1..20: note = Target: ANGPTL4; (+) strand; PAM type: YTN; PAM sequence: CTG
  source 1..20: mol_type = other DNA
ggcgacaagagggaaactcc

SEQ ID NO: 16508 - DNA, 20 bp, synthetic construct
  misc_feature 1..20: note = Description of Artificial Sequence: Synthetic oligonucleotide
  misc_feature 1..20: note = Target: ANGPTL4; (+) strand; PAM type: YTN; PAM sequence: CTC
  source 1..20: mol_type = other DNA
catctcaaaaaaataaataa

SEQ ID NO: 16509 - DNA, 20 bp, synthetic construct
  misc_feature 1..20: note = Description of Artificial Sequence: Synthetic oligonucleotide
  misc_feature 1..20: note = Target: ANGPTL4; (+) strand; PAM type: YTN; PAM sequence: CTC
  source 1..20: mol_type = other DNA
aaaaaaataaataaataaaa

SEQ ID NO: 16510 - DNA, 20 bp, synthetic construct
  misc_feature 1..20: note = Description of Artificial Sequence: Synthetic oligonucleotide
  misc_feature 1..20: note = Target: ANGPTL4; (+) strand; PAM type: YTN; PAM sequence: CTG
  source 1..20: mol_type = other DNA
ggcgcggtggctcatgcctg

SEQ ID NO: 16511 - DNA, 20 bp, synthetic construct
  misc_feature 1..20: note = Description of Artificial Sequence: Synthetic oligonucleotide
  misc_feature 1..20: note = Target: ANGPTL4; (+) strand; PAM type: YTN; PAM sequence: CTC
  source 1..20: mol_type = other DNA
atgcctgtaatcccagcact

SEQ ID NO: 16512 - DNA, 20 bp, synthetic construct
  misc_feature 1..20: note = Description of Artificial Sequence: Synthetic oligonucleotide
  misc_feature 1..20: note = Target: ANGPTL4; (+) strand; PAM type: YTN; PAM sequence: CTG
  source 1..20: mol_type = other DNA
taatcccagcactttgggag

SEQ ID NO: 16513 - DNA, 20 bp, synthetic construct
  misc_feature 1..20: note = Description of Artificial Sequence: Synthetic oligonucleotide
  misc_feature 1..20: note = Target: ANGPTL4; (+) strand; PAM type: YTN; PAM sequence: CTT
  source 1..20: mol_type = other DNA
tgggaggccgaagcgggcgg

SEQ ID NO: 16514 - DNA, 20 bp, synthetic construct
  misc_feature 1..20: note = Description of Artificial Sequence: Synthetic oligonucleotide
  misc_feature 1..20: note = Target: ANGPTL4; (+) strand; PAM type: YTN; PAM sequence: TTT
  source 1..20: mol_type = other DNA
gggaggccgaagcgggcgga

SEQ ID NO: 16515 - DNA, 20 bp, synthetic construct
  misc_feature 1..20: note = Description of Artificial Sequence: Synthetic oligonucleotide
  misc_feature 1..20: note = Target: ANGPTL4; (+) strand; PAM type: YTN; PAM sequence: TTG
  source 1..20: mol_type = other DNA
ggaggccgaagcgggcggat

SEQ ID NO: 16516 - DNA, 20 bp, synthetic construct
  misc_feature 1..20: note = Description of Artificial Sequence: Synthetic oligonucleotide
  misc_feature 1..20: note = Target: ANGPTL4; (+) strand; PAM type: YTN; PAM sequence: CTG
  source 1..20: mol_type = other DNA
gctaacatggtgaaaccctg

SEQ ID NO: 16517 - DNA, 20 bp, synthetic construct
  misc_feature 1..20: note = Description of Artificial Sequence: Synthetic oligonucleotide
  misc_feature 1..20: note = Target: ANGPTL4; (+) strand; PAM type: YTN; PAM sequence: CTA
  source 1..20: mol_type = other DNA
acatggtgaaaccctgtctc

SEQ ID NO: 16518 - DNA, 20 bp, synthetic construct
  misc_feature 1..20: note = Description of Artificial Sequence: Synthetic oligonucleotide
  misc_feature 1..20: note = Target: ANGPTL4; (+) strand; PAM type: YTN; PAM sequence: CTG
  source 1..20: mol_type = other DNA
tctctattaaaaatacaaaa

SEQ ID NO: 16519 - DNA, 20 bp, synthetic construct
  misc_feature 1..20: note = Description of Artificial Sequence: Synthetic oligonucleotide
  misc_feature 1..20: note = Target: ANGPTL4; (+) strand; PAM type: YTN; PAM sequence: CTC
  source 1..20: mol_type = other DNA
tattaaaaatacaaaaaatt

SEQ ID NO: 16520 - DNA, 20 bp, synthetic construct
  misc_feature 1..20: note = Description of Artificial Sequence: Synthetic oligonucleotide
  misc_feature 1..20: note = Target: ANGPTL4; (+) strand; PAM type: YTN; PAM sequence: CTA
  source 1..20: mol_type = other DNA
ttaaaaatacaaaaaattag

SEQ ID NO: 16521 - DNA, 20 bp, synthetic construct
  misc_feature 1..20: note = Description of Artificial Sequence: Synthetic oligonucleotide
  misc_feature 1..20: note = Target: ANGPTL4; (+) strand; PAM type: YTN; PAM sequence: TTA
  source 1..20: mol_type = other DNA
aaaatacaaaaaattagctg

SEQ ID NO: 16522 - DNA, 20 bp, synthetic construct
  misc_feature 1..20: note = Description of Artificial Sequence: Synthetic oligonucleotide
  misc_feature 1..20: note = Target: ANGPTL4; (+) strand; PAM type: YTN; PAM sequence: TTA
  source 1..20: mol_type = other DNA
gctgggcatggtggcaggtg

SEQ ID NO: 16523 - DNA, 20 bp, synthetic construct
  misc_feature 1..20: note = Description of Artificial Sequence: Synthetic oligonucleotide
  misc_feature 1..20: note = Target: ANGPTL4; (+) strand; PAM type: YTN; PAM sequence: CTG
  source 1..20: mol_type = other DNA
ggcatggtggcaggtgcctg

SEQ ID NO: 16524 - DNA, 20 bp, synthetic construct
  misc_feature 1..20: note = Description of Artificial Sequence: Synthetic oligonucleotide
  misc_feature 1..20: note = Target: ANGPTL4; (+) strand; PAM type: YTN; PAM sequence: CTG
  source 1..20: mol_type = other DNA
tagtcccagctactcgggag

SEQ ID NO: 16525 - DNA, 20 bp, synthetic construct
  misc_feature 1..20: note = Description of Artificial Sequence: Synthetic oligonucleotide
  misc_feature 1..20: note = Target: ANGPTL4; (+) strand; PAM type: YTN; PAM sequence: CTA
  source 1..20: mol_type = other DNA
ctcgggaggctgaggcagga

SEQ ID NO: 16526 - DNA, 20 bp, synthetic construct
  misc_feature 1..20: note = Description of Artificial Sequence: Synthetic oligonucleotide
  misc_feature 1..20: note = Target: ANGPTL4; (+) strand; PAM type: YTN; PAM sequence: CTC
  source 1..20: mol_type = other DNA
gggaggctgaggcaggagaa

SEQ ID NO: 16527 - DNA, 20 bp, synthetic construct
  misc_feature 1..20: note = Description of Artificial Sequence: Synthetic oligonucleotide
  misc_feature 1..20: note = Target: ANGPTL4; (+) strand; PAM type: YTN; PAM sequence: CTG
  source 1..20: mol_type = other DNA
aggcaggagaatggcactaa

SEQ ID NO: 16528 - DNA, 20 bp, synthetic construct
  misc_feature 1..20: note = Description of Artificial Sequence: Synthetic oligonucleotide
  misc_feature 1..20: note = Target: ANGPTL4; (+) strand; PAM type: YTN; PAM sequence: CTA
  source 1..20: mol_type = other DNA
acccgggaggtggagcttgc

SEQ ID NO: 16529 - DNA, 20 bp, synthetic construct
  misc_feature 1..20: note = Description of Artificial Sequence: Synthetic oligonucleotide
  misc_feature 1..20: note = Target: ANGPTL4; (+) strand; PAM type: YTN; PAM sequence: CTT
  source 1..20: mol_type = other DNA
gcagtgagccgagattgcgc

SEQ ID NO: 16530 - DNA, 20 bp, synthetic construct
  misc_feature 1..20: note = Description of Artificial Sequence: Synthetic oligonucleotide
  misc_feature 1..20: note = Target: ANGPTL4; (+) strand; PAM type: YTN; PAM sequence: TTG
  source 1..20: mol_type = other DNA
cagtgagccgagattgcgcc

SEQ ID NO: 16531 - DNA, 20 bp, synthetic construct
  misc_feature 1..20: note = Description of Artificial Sequence: Synthetic oligonucleotide
  misc_feature 1..20: note = Target: ANGPTL4; (+) strand; PAM type: YTN; PAM sequence: TTG
  source 1..20: mol_type = other DNA
cgccactgcactccagcgtg

SEQ ID NO: 16532 - DNA, 20 bp, synthetic construct
  misc_feature 1..20: note = Description of Artificial Sequence: Synthetic oligonucleotide
  misc_feature 1..20: note = Target: ANGPTL4; (+) strand; PAM type: YTN; PAM sequence: CTG
  source 1..20: mol_type = other DNA
cactccagcgtgggcgacag

SEQ ID NO: 16533 - DNA, 20 bp, synthetic construct
  misc_feature 1..20: note = Description of Artificial Sequence: Synthetic oligonucleotide
  misc_feature 1..20: note = Target: ANGPTL4; (+) strand; PAM type: YTN; PAM sequence: CTC
  source 1..20: mol_type = other DNA
cagcgtgggcgacagagcga

SEQ ID NO: 16534 - DNA, 20 bp, synthetic construct
  misc_feature 1..20: note = Description of Artificial Sequence: Synthetic oligonucleotide
  misc_feature 1..20: note = Target: ANGPTL4; (+) strand; PAM type: YTN; PAM sequence: CTC
  source 1..20: mol_type = other DNA
cttctcaaaaaataaataaa

SEQ ID NO: 16535 - DNA, 20 bp, synthetic construct
  misc_feature 1..20: note = Description of Artificial Sequence: Synthetic oligonucleotide
  misc_feature 1..20: note = Target: ANGPTL4; (+) strand; PAM type: YTN; PAM sequence: CTT
  source 1..20: mol_type = other DNA
ctcaaaaaataaataaataa

SEQ ID NO: 16536 - DNA, 20 bp, synthetic construct
  misc_feature 1..20: note = Description of Artificial Sequence: Synthetic oligonucleotide
  misc_feature 1..20: note = Target: ANGPTL4; (+) strand; PAM type: YTN; PAM sequence: TTC
  source 1..20: mol_type = other DNA
tcaaaaaataaataaataaa

SEQ ID NO: 16537 - DNA, 20 bp, synthetic construct
  misc_feature 1..20: note = Description of Artificial Sequence: Synthetic oligonucleotide
  misc_feature 1..20: note = Target: ANGPTL4; (+) strand; PAM type: YTN; PAM sequence: CTC
  source 1..20: mol_type = other DNA
aaaaaataaataaataaata

SEQ ID NO: 16538 - DNA, 20 bp, synthetic construct
  misc_feature 1..20: note = Description of Artificial Sequence: Synthetic oligonucleotide
  misc_feature 1..20: note = Target: ANGPTL4; (+) strand; PAM type: YTN; PAM sequence: TTT
  source 1..20: mol_type = other DNA
ttagaataaaatctagagcc

SEQ ID NO: 16539 - DNA, 20 bp, synthetic construct
  misc_feature 1..20: note = Description of Artificial Sequence: Synthetic oligonucleotide
  misc_feature 1..20: note = Target: ANGPTL4; (+) strand; PAM type: YTN; PAM sequence: TTT
  source 1..20: mol_type = other DNA
tagaataaaatctagagcca

SEQ ID NO: 16540 - DNA, 20 bp, synthetic construct
  misc_feature 1..20: note = Description of Artificial Sequence: Synthetic oligonucleotide
  misc_feature 1..20: note = Target: ANGPTL4; (+) strand; PAM type: YTN; PAM sequence: TTT
  source 1..20: mol_type = other DNA
agaataaaatctagagccaa

SEQ ID NO: 16541 - DNA, 20 bp, synthetic construct
  misc_feature 1..20: note = Description of Artificial Sequence: Synthetic oligonucleotide
  misc_feature 1..20: note = Target: ANGPTL4; (+) strand; PAM type: YTN; PAM sequence: TTA
  source 1..20: mol_type = other DNA
gaataaaatctagagccaac

SEQ ID NO: 16542 - DNA, 20 bp, synthetic construct
  misc_feature 1..20: note = Description of Artificial Sequence: Synthetic oligonucleotide
  misc_feature 1..20: note = Target: ANGPTL4; (+) strand; PAM type: YTN; PAM sequence: CTA
  source 1..20: mol_type = other DNA
gagccaacttgaggcgacag

SEQ ID NO: 16543 - DNA, 20 bp, synthetic construct
  misc_feature 1..20: note = Description of Artificial Sequence: Synthetic oligonucleotide
  misc_feature 1..20: note = Target: ANGPTL4; (+) strand; PAM type: YTN; PAM sequence: CTT
  source 1..20: mol_type = other DNA
gaggcgacagtatagactct

SEQ ID NO: 16544 - DNA, 20 bp, synthetic construct
  misc_feature 1..20: note = Description of Artificial Sequence: Synthetic oligonucleotide
  misc_feature 1..20: note = Target: ANGPTL4; (+) strand; PAM type: YTN; PAM sequence: TTG
  source 1..20: mol_type = other DNA
aggcgacagtatagactctt

SEQ ID NO: 16545 - DNA, 20 bp, synthetic construct
  misc_feature 1..20: note = Description of Artificial Sequence: Synthetic oligonucleotide
  misc_feature 1..20: note = Target: ANGPTL4; (+) strand; PAM type: YTN; PAM sequence: CTC
  source 1..20: mol_type = other DNA
ttttgtagattgctcacagc

SEQ ID NO: 16546 - DNA, 20 bp, synthetic construct
  misc_feature 1..20: note = Description of Artificial Sequence: Synthetic oligonucleotide
  misc_feature 1..20: note = Target: ANGPTL4; (+) strand; PAM type: YTN; PAM sequence: CTT
  source 1..20: mol_type = other DNA
ttgtagattgctcacagcag

SEQ ID NO: 16547 - DNA, 20 bp, synthetic construct
  misc_feature 1..20: note = Description of Artificial Sequence: Synthetic oligonucleotide
  misc_feature 1..20: note = Target: ANGPTL4; (+) strand; PAM type: YTN; PAM sequence: TTT
  source 1..20: mol_type = other DNA
tgtagattgctcacagcagg

SEQ ID NO: 16548 - DNA, 20 bp, synthetic construct
  misc_feature 1..20: note = Description of Artificial Sequence: Synthetic oligonucleotide
  misc_feature 1..20: note = Target: ANGPTL4; (+) strand; PAM type: YTN; PAM sequence: TTT
  source 1..20: mol_type = other DNA
gtagattgctcacagcaggt

SEQ ID NO: 16549 - DNA, 20 bp, synthetic construct
  misc_feature 1..20: note = Description of Artificial Sequence: Synthetic oligonucleotide
  misc_feature 1..20: note = Target: ANGPTL4; (+) strand; PAM type: YTN; PAM sequence: TTG
  source 1..20: mol_type = other DNA
tagattgctcacagcaggtg

SEQ ID NO: 16550 - DNA, 20 bp, synthetic construct
  misc_feature 1..20: note = Description of Artificial Sequence: Synthetic oligonucleotide
  misc_feature 1..20: note = Target: ANGPTL4; (+) strand; PAM type: YTN; PAM sequence: TTG
  source 1..20: mol_type = other DNA
ctcacagcaggtgcccttaa

SEQ ID NO: 16551 - DNA, 20 bp, synthetic construct
  misc_feature 1..20: note = Description of Artificial Sequence: Synthetic oligonucleotide
  misc_feature 1..20: note = Target: ANGPTL4; (+) strand; PAM type: YTN; PAM sequence: CTC
  source 1..20: mol_type = other DNA
acagcaggtgcccttaagac

SEQ ID NO: 16552 - DNA, 20 bp, synthetic construct
  misc_feature 1..20: note = Description of Artificial Sequence: Synthetic oligonucleotide
  misc_feature 1..20: note = Target: ANGPTL4; (+) strand; PAM type: YTN; PAM sequence: CTT
  source 1..20: mol_type = other DNA
aagaccctgggtctgtgatg

SEQ ID NO: 16553 - DNA, 20 bp, synthetic construct
  misc_feature 1..20: note = Description of Artificial Sequence: Synthetic oligonucleotide
  misc_feature 1..20: note = Target: ANGPTL4; (+) strand; PAM type: YTN; PAM sequence: TTA
  source 1..20: mol_type = other DNA
agaccctgggtctgtgatgt

SEQ ID NO: 16554 - DNA, 20 bp, synthetic construct
  misc_feature 1..20: note = Description of Artificial Sequence: Synthetic oligonucleotide
  misc_feature 1..20: note = Target: ANGPTL4; (+) strand; PAM type: YTN; PAM sequence: CTG
  source 1..20: mol_type = other DNA
ggtctgtgatgtgttttgtg

SEQ ID NO: 16555 - DNA, 20 bp, synthetic construct
  misc_feature 1..20: note = Description of Artificial Sequence: Synthetic oligonucleotide
  misc_feature 1..20: note = Target: ANGPTL4; (+) strand; PAM type: YTN; PAM sequence: CTG
  source 1..20: mol_type = other DNA
tgatgtgttttgtgctgtgg

SEQ ID NO: 16556 - DNA, 20 bp, synthetic construct
  misc_feature 1..20: note = Description of Artificial Sequence: Synthetic oligonucleotide
  misc_feature 1..20: note = Target: ANGPTL4; (+) strand; PAM type: YTN; PAM sequence: TTT
  source 1..20: mol_type = other DNA
tgtgctgtgggacacatggc

SEQ ID NO: 16557 - DNA, 20 bp, synthetic construct
  misc_feature 1..20: note = Description of Artificial Sequence: Synthetic oligonucleotide
  misc_feature 1..20: note = Target: ANGPTL4; (+) strand; PAM type: YTN; PAM sequence: TTT
  source 1..20: mol_type = other DNA
gtgctgtgggacacatggct

SEQ ID NO: 16558 - DNA, 20 bp, synthetic construct
  misc_feature 1..20: note = Description of Artificial Sequence: Synthetic oligonucleotide
  misc_feature 1..20: note = Target: ANGPTL4; (+) strand; PAM type: YTN; PAM sequence: TTG
  source 1..20: mol_type = other DNA
tgctgtgggacacatggctc

SEQ ID NO: 16559 - DNA, 20 bp, synthetic construct
  misc_feature 1..20: note = Description of Artificial Sequence: Synthetic oligonucleotide
  misc_feature 1..20: note = Target: ANGPTL4; (+) strand; PAM type: YTN; PAM sequence: CTG
  source 1..20: mol_type = other DNA
tgggacacatggctccaaag

SEQ ID NO: 16560 - DNA, 20 bp, synthetic construct
  misc_feature 1..20: note = Description of Artificial Sequence: Synthetic oligonucleotide
  misc_feature 1..20: note = Target: ANGPTL4; (+) strand; PAM type: YTN; PAM sequence: CTC
  source 1..20: mol_type = other DNA
caaagaagtccctgaaaatc

SEQ ID NO: 16561 - DNA, 20 bp, synthetic construct
  misc_feature 1..20: note = Description of Artificial Sequence: Synthetic oligonucleotide
  misc_feature 1..20: note = Target: ANGPTL4; (+) strand; PAM type: YTN; PAM sequence: CTG
  source 1..20: mol_type = other DNA
aaaatcagatcatgaaaagg

SEQ ID NO: 16562 - DNA, 20 bp, synthetic construct
  misc_feature 1..20: note = Description of Artificial Sequence: Synthetic oligonucleotide
  misc_feature 1..20: note = Target: ANGPTL4; (+) strand; PAM type: YTN; PAM sequence: TTG
  source 1..20: mol_type = other DNA
gggaagtaattgatcagttc

SEQ ID NO: 16563 - DNA, 20 bp, synthetic construct
  misc_feature 1..20: note = Description of Artificial Sequence: Synthetic oligonucleotide
  misc_feature 1..20: note = Target: ANGPTL4; (+) strand; PAM type: YTN; PAM sequence: TTG
  source 1..20: mol_type = other DNA
atcagttctctcagtttaag

SEQ ID NO: 16564 - DNA, 20 bp, synthetic construct
  misc_feature 1..20: note = Description of Artificial Sequence: Synthetic oligonucleotide
  misc_feature 1..20: note = Target: ANGPTL4; (+) strand; PAM type: YTN; PAM sequence: TTC
  source 1..20: mol_type = other DNA
tctcagtttaagaaggtggg

SEQ ID NO: 16565 - DNA, 20 bp, synthetic construct
  misc_feature 1..20: note = Description of Artificial Sequence: Synthetic oligonucleotide
  misc_feature 1..20: note = Target: ANGPTL4; (+) strand; PAM type: YTN; PAM sequence: CTC
  source 1..20: mol_type = other DNA
tcagtttaagaaggtgggga

SEQ ID NO: 16566 - DNA, 20 bp, synthetic construct
  misc_feature 1..20: note = Description of Artificial Sequence: Synthetic oligonucleotide
  misc_feature 1..20: note = Target: ANGPTL4; (+) strand; PAM type: YTN; PAM sequence: CTC
  source 1..20: mol_type = other DNA
agtttaagaaggtggggaag

SEQ ID NO: 16567 - DNA, 20 bp, synthetic construct
  misc_feature 1..20: note = Description of Artificial Sequence: Synthetic oligonucleotide
  misc_feature 1..20: note = Target: ANGPTL4; (+) strand; PAM type: YTN; PAM sequence: TTT
  source 1..20: mol_type = other DNA
aagaaggtggggaagaggag

SEQ ID NO: 16568 - DNA, 20 bp, synthetic construct
  misc_feature 1..20: note = Description of Artificial Sequence: Synthetic oligonucleotide
  misc_feature 1..20: note = Target: ANGPTL4; (+) strand; PAM type: YTN; PAM sequence: TTA
  source 1..20: mol_type = other DNA
agaaggtggggaagaggagg

SEQ ID NO: 16569 - DNA, 20 bp, synthetic construct
  misc_feature 1..20: note = Description of Artificial Sequence: Synthetic oligonucleotide
  misc_feature 1..20: note = Target: ANGPTL4; (+) strand; PAM type: YTN; PAM sequence: CTT
  source 1..20: mol_type = other DNA
gcattctgggatagcctggg

SEQ ID NO: 16570 - DNA, 20 bp, synthetic construct
  misc_feature 1..20: note = Description of Artificial Sequence: Synthetic oligonucleotide
  misc_feature 1..20: note = Target: ANGPTL4; (+) strand; PAM type: YTN; PAM sequence: TTG
  source 1..20: mol_type = other DNA
cattctgggatagcctggga

SEQ ID NO: 16571 - DNA, 20 bp, synthetic construct
  misc_feature 1..20: note = Description of Artificial Sequence: Synthetic oligonucleotide
  misc_feature 1..20: note = Target: ANGPTL4; (+) strand; PAM type: YTN; PAM sequence: TTC
  source 1..20: mol_type = other DNA
tgggatagcctgggatagct

SEQ ID NO: 16572 - DNA, 20 bp, synthetic construct
  misc_feature 1..20: note = Description of Artificial Sequence: Synthetic oligonucleotide
  misc_feature 1..20: note = Target: ANGPTL4; (+) strand; PAM type: YTN; PAM sequence: CTG
  source 1..20: mol_type = other DNA
ggatagcctgggatagctgt

SEQ ID NO: 16573 - DNA, 20 bp, synthetic construct
  misc_feature 1..20: note = Description of Artificial Sequence: Synthetic oligonucleotide
  misc_feature 1..20: note = Target: ANGPTL4; (+) strand; PAM type: YTN; PAM sequence: CTG
  source 1..20: mol_type = other DNA
ggatagctgtgtccctactc

SEQ ID NO: 16574 - DNA, 20 bp, synthetic construct
  misc_feature 1..20: note = Description of Artificial Sequence: Synthetic oligonucleotide
  misc_feature 1..20: note = Target: ANGPTL4; (+) strand; PAM type: YTN; PAM sequence: CTG
  source 1..20: mol_type = other DNA
tgtccctactcagagagagg

SEQ ID NO: 16575 - DNA, 20 bp, synthetic construct
  misc_feature 1..20: note = Description of Artificial Sequence: Synthetic oligonucleotide
  misc_feature 1..20: note = Target: ANGPTL4; (+) strand; PAM type: YTN; PAM sequence: CTA
  source 1..20: mol_type = other DNA
ctcagagagaggctgggggc

SEQ ID NO: 16576 - DNA, 20 bp, synthetic construct
  misc_feature 1..20: note = Description of Artificial Sequence: Synthetic oligonucleotide
  misc_feature 1..20: note = Target: ANGPTL4; (+) strand; PAM type: YTN; PAM sequence: CTC
  source 1..20: mol_type = other DNA
agagagaggctgggggcttg

SEQ ID NO: 16577 - DNA, 20 bp, synthetic construct
  misc_feature 1..20: note = Description of Artificial Sequence: Synthetic oligonucleotide
  misc_feature 1..20: note = Target: ANGPTL4; (+) strand; PAM type: YTN; PAM sequence: CTG
  source 1..20: mol_type = other DNA
ggggcttgggggtggacagg

SEQ ID NO: 16578 - DNA, 20 bp, synthetic construct
  misc_feature 1..20: note = Description of Artificial Sequence: Synthetic oligonucleotide
  misc_feature 1..20: note = Target: ANGPTL4; (+) strand; PAM type: YTN; PAM sequence: CTT
  source 1..20: mol_type = other DNA
gggggtggacaggccagacg

SEQ ID NO: 16579 - DNA, 20 bp, synthetic construct
  misc_feature 1..20: note = Description of Artificial Sequence: Synthetic oligonucleotide
  misc_feature 1..20: note = Target: ANGPTL4; (+) strand; PAM type: YTN; PAM sequence: TTG
  source 1..20: mol_type = other DNA
ggggtggacaggccagacgg

SEQ ID NO: 16580 - DNA, 20 bp, synthetic construct
  misc_feature 1..20: note = Description of Artificial Sequence: Synthetic oligonucleotide
  misc_feature 1..20: note = Target: ANGPTL4; (+) strand; PAM type: YTN; PAM sequence: CTG
  source 1..20: mol_type = other DNA
aacctactcctcactggggt

SEQ ID NO: 16581 - DNA, 20 bp, synthetic construct
  misc_feature 1..20: note = Description of Artificial Sequence: Synthetic oligonucleotide
  misc_feature 1..20: note = Target: ANGPTL4; (+) strand; PAM type: YTN; PAM sequence: CTA
  source 1..20: mol_type = other DNA
ctcctcactggggttttcct

SEQ ID NO: 16582 - DNA, 20 bp, synthetic construct
  misc_feature 1..20: note = Description of Artificial Sequence: Synthetic oligonucleotide
  misc_feature 1..20: note = Target: ANGPTL4; (+) strand; PAM type: YTN; PAM sequence: CTC
  source 1..20: mol_type = other DNA
ctcactggggttttcctccc

SEQ ID NO: 16583 - DNA, 20 bp, synthetic construct
  misc_feature 1..20: note = Description of Artificial Sequence: Synthetic oligonucleotide
  misc_feature 1..20: note = Target: ANGPTL4; (+) strand; PAM type: YTN; PAM sequence: CTC
  source 1..20: mol_type = other DNA
actggggttttcctccctcc

SEQ ID NO: 16584 - DNA, 20 bp, synthetic construct
  misc_feature 1..20: note = Description of Artificial Sequence: Synthetic oligonucleotide
  misc_feature 1..20: note = Target: ANGPTL4; (+) strand; PAM type: YTN; PAM sequence: CTG
  source 1..20: mol_type = other DNA
gggttttcctccctcccttt

SEQ ID NO: 16585 - DNA, 20 bp, synthetic construct
  misc_feature 1..20: note = Description of Artificial Sequence: Synthetic oligonucleotide
  misc_feature 1..20: note = Target: ANGPTL4; (+) strand; PAM type: YTN; PAM sequence: TTT
  source 1..20: mol_type = other DNA
tcctccctccctttcctgtc

SEQ ID NO: 16586 - DNA, 20 bp, synthetic construct
  misc_feature 1..20: note = Description of Artificial Sequence: Synthetic oligonucleotide
  misc_feature 1..20: note = Target: ANGPTL4; (+) strand; PAM type: YTN; PAM sequence: TTT
  source 1..20: mol_type = other DNA
cctccctccctttcctgtcc

SEQ ID NO: 16587 - DNA, 20 bp, synthetic construct
  misc_feature 1..20: note = Description of Artificial Sequence: Synthetic oligonucleotide
  misc_feature 1..20: note = Target: ANGPTL4; (+) strand; PAM type: YTN; PAM sequence: TTC
  source 1..20: mol_type = other DNA
ctccctccctttcctgtcca

SEQ ID NO: 16588 - DNA, 20 bp, synthetic construct
  misc_feature 1..20: note = Description of Artificial Sequence: Synthetic oligonucleotide
  misc_feature 1..20: note = Target: ANGPTL4; (+) strand; PAM type: YTN; PAM sequence: CTC
  source 1..20: mol_type = other DNA
cctccctttcctgtccactg

SEQ ID NO: 16589 - DNA, 20 bp, synthetic construct
  misc_feature 1..20: note = Description of Artificial Sequence: Synthetic oligonucleotide
  misc_feature 1..20: note = Target: ANGPTL4; (+) strand; PAM type: YTN; PAM sequence: CTC
  source 1..20: mol_type = other DNA
cctttcctgtccactgctgc

SEQ ID NO: 16590 - DNA, 20 bp, synthetic construct
  misc_feature 1..20: note = Description of Artificial Sequence: Synthetic oligonucleotide
  misc_feature 1..20: note = Target: ANGPTL4; (+) strand; PAM type: YTN; PAM sequence: CTT
  source 1..20: mol_type = other DNA
tcctgtccactgctgctggg

SEQ ID NO: 16591 - DNA, 20 bp, synthetic construct
  misc_feature 1..20: note = Description of Artificial Sequence: Synthetic oligonucleotide
  misc_feature 1..20: note = Target: ANGPTL4; (+) strand; PAM type: YTN; PAM sequence: TTT
  source 1..20: mol_type = other DNA
cctgtccactgctgctggga

SEQ ID NO: 16592 - DNA, 20 bp, synthetic construct
  misc_feature 1..20: note = Description of Artificial Sequence: Synthetic oligonucleotide
  misc_feature 1..20: note = Target: ANGPTL4; (+) strand; PAM type: YTN; PAM sequence: TTC
  source 1..20: mol_type = other DNA
ctgtccactgctgctgggag

SEQ ID NO: 16593 - DNA, 20 bp, synthetic construct
  misc_feature 1..20: note = Description of Artificial Sequence: Synthetic oligonucleotide
  misc_feature 1..20: note = Target: ANGPTL4; (+) strand; PAM type: YTN; PAM sequence: CTG
  source 1..20: mol_type = other DNA
tccactgctgctgggaggga

SEQ ID NO: 16594 - DNA, 20 bp, synthetic construct
  misc_feature 1..20: note = Description of Artificial Sequence: Synthetic oligonucleotide
  misc_feature 1..20: note = Target: ANGPTL4; (+) strand; PAM type: YTN; PAM sequence: CTG
  source 1..20: mol_type = other DNA
ctgctgggagggatttgctg

SEQ ID NO: 16595 - DNA, 20 bp, synthetic construct
  misc_feature 1..20: note = Description of Artificial Sequence: Synthetic oligonucleotide
  misc_feature 1..20: note = Target: ANGPTL4; (+) strand; PAM type: YTN; PAM sequence: CTG
  source 1..20: mol_type = other DNA
ctgggagggatttgctgtcc

SEQ ID NO: 16596 - DNA, 20 bp, synthetic construct
  misc_feature 1..20: note = Description of Artificial Sequence: Synthetic oligonucleotide
  misc_feature 1..20: note = Target: ANGPTL4; (+) strand; PAM type: YTN; PAM sequence: CTG
  source 1..20: mol_type = other DNA
ggagggatttgctgtcctgg

SEQ ID NO: 16597 - DNA, 20 bp, synthetic construct
  misc_feature 1..20: note = Description of Artificial Sequence: Synthetic oligonucleotide
  misc_feature 1..20: note = Target: ANGPTL4; (+) strand; PAM type: YTN; PAM sequence: TTT
  source 1..20: mol_type = other DNA
gctgtcctggcatctggccc

SEQ ID NO: 16598 - DNA, 20 bp, synthetic construct
  misc_feature 1..20: note = Description of Artificial Sequence: Synthetic oligonucleotide
  misc_feature 1..20: note = Target: ANGPTL4; (+) strand; PAM type: YTN; PAM sequence: TTG
  source 1..20: mol_type = other DNA
ctgtcctggcatctggccca

SEQ ID NO: 16599 - DNA, 20 bp, synthetic construct
  misc_feature 1..20: note = Description of Artificial Sequence: Synthetic oligonucleotide
  misc_feature 1..20: note = Target: ANGPTL4; (+) strand; PAM type: YTN; PAM sequence: CTG
  source 1..20: mol_type = other DNA
tcctggcatctggcccagct

SEQ ID NO: 16600 - DNA, 20 bp, synthetic construct
  misc_feature 1..20: note = Description of Artificial Sequence: Synthetic oligonucleotide
  misc_feature 1..20: note = Target: ANGPTL4; (+) strand; PAM type: YTN; PAM sequence: CTG
  source 1..20: mol_type = other DNA
gcatctggcccagctgacgg

SEQ ID NO: 16601 - DNA, 20 bp, synthetic construct
  misc_feature 1..20: note = Description of Artificial Sequence: Synthetic oligonucleotide
  misc_feature 1..20: note = Target: ANGPTL4; (+) strand; PAM type: YTN; PAM sequence: CTG
  source 1..20: mol_type = other DNA
gcccagctgacggggccaag

SEQ ID NO: 16602 - DNA, 20 bp, synthetic construct
  misc_feature 1..20: note = Description of Artificial Sequence: Synthetic oligonucleotide
  misc_feature 1..20: note = Target: ANGPTL4; (+) strand; PAM type: YTN; PAM sequence: CTG
  source 1..20: mol_type = other DNA
acggggccaagtgtatgagt

SEQ ID NO: 16603 - DNA, 20 bp, synthetic construct
  misc_feature 1..20: note = Description of Artificial Sequence: Synthetic oligonucleotide
  misc_feature 1..20: note = Target: ANGPTL4; (+) strand; PAM type: YTN; PAM sequence: CTG
  source 1..20: mol_type = other DNA
cacgtcagcccttgggtgtg

SEQ ID NO: 16604 - DNA, 20 bp, synthetic construct
  misc_feature 1..20: note = Description of Artificial Sequence: Synthetic oligonucleotide
  misc_feature 1..20: note = Target: ANGPTL4; (+) strand; PAM type: YTN; PAM sequence: CTT
  source 1..20: mol_type = other DNA
gggtgtgcagtttcagattc

SEQ ID NO: 16605 - DNA, 20 bp, synthetic construct
  misc_feature 1..20: note = Description of Artificial Sequence: Synthetic oligonucleotide
  misc_feature 1..20: note = Target: ANGPTL4; (+) strand; PAM type: YTN; PAM sequence: TTG
  source 1..20: mol_type = other DNA
ggtgtgcagtttcagattcc

SEQ ID NO: 16606 - DNA, 20 bp, synthetic construct
  misc_feature 1..20: note = Description of Artificial Sequence: Synthetic oligonucleotide
  misc_feature 1..20: note = Target: ANGPTL4; (+) strand; PAM type: YTN; PAM sequence: TTT
  source 1..20: mol_type = other DNA
cagattccagagaatgagct

SEQ ID NO: 16607 - DNA, 20 bp, synthetic construct
  misc_feature 1..20: note = Description of Artificial Sequence: Synthetic oligonucleotide
  misc_feature 1..20: note = Target: ANGPTL4; (+) strand; PAM type: YTN; PAM sequence: TTC
  source 1..20: mol_type = other DNA
agattccagagaatgagctg

SEQ ID NO: 16608 - DNA, 20 bp, synthetic construct
  misc_feature 1..20: note = Description of Artificial Sequence: Synthetic oligonucleotide
  misc_feature 1..20: note = Target: ANGPTL4; (+) strand; PAM type: YTN; PAM sequence: TTC
  source 1..20: mol_type = other DNA
cagagaatgagctggcttgg

SEQ ID NO: 16609 - DNA, 20 bp, synthetic construct
  misc_feature 1..20: note = Description of Artificial Sequence: Synthetic oligonucleotide
  misc_feature 1..20: note = Target: ANGPTL4; (+) strand; PAM type: YTN; PAM sequence: CTG
  source 1..20: mol_type = other DNA
gcttggagccctgctgagtc

SEQ ID NO: 16610 - DNA, 20 bp, synthetic construct
  misc_feature 1..20: note = Description of Artificial Sequence: Synthetic oligonucleotide
  misc_feature 1..20: note = Target: ANGPTL4; (+) strand; PAM type: YTN; PAM sequence: CTT
  source 1..20: mol_type = other DNA
ggagccctgctgagtcaatg

SEQ ID NO: 16611 - DNA, 20 bp, synthetic construct
  misc_feature 1..20: note = Description of Artificial Sequence: Synthetic oligonucleotide
  misc_feature 1..20: note = Target: ANGPTL4; (+) strand; PAM type: YTN; PAM sequence: TTG
  source 1..20: mol_type = other DNA
gagccctgctgagtcaatgc

SEQ ID NO: 16612 - DNA, 20 bp, synthetic construct
  misc_feature 1..20: note = Description of Artificial Sequence: Synthetic oligonucleotide
  misc_feature 1..20: note = Target: ANGPTL4; (+) strand; PAM type: YTN; PAM sequence: CTG
  source 1..20: mol_type = other DNA
ctgagtcaatgcccttctcc

SEQ ID NO: 16613 - DNA, 20 bp, synthetic construct
  misc_feature 1..20: note = Description of Artificial Sequence: Synthetic oligonucleotide
  misc_feature 1..20: note = Target: ANGPTL4; (+) strand; PAM type: YTN; PAM sequence: CTG
  source 1..20: mol_type = other DNA
agtcaatgcccttctccttg

SEQ ID NO: 16614 - DNA, 20 bp, synthetic construct
  misc_feature 1..20: note = Description of Artificial Sequence: Synthetic oligonucleotide
  misc_feature 1..20: note = Target: ANGPTL4; (+) strand; PAM type: YTN; PAM sequence: CTT
  source 1..20: mol_type = other DNA
ctccttgccagtgctctgag

SEQ ID NO: 16615 - DNA, 20 bp, synthetic construct
  misc_feature 1..20: note = Description of Artificial Sequence: Synthetic oligonucleotide
  misc_feature 1..20: note = Target: ANGPTL4; (+) strand; PAM type: YTN; PAM sequence: TTC
  source 1..20: mol_type = other DNA
tccttgccagtgctctgagc

SEQ ID NO: 16616 - DNA, 20 bp, synthetic construct
  misc_feature 1..20: note = Description of Artificial Sequence: Synthetic oligonucleotide
  misc_feature 1..20: note = Target: ANGPTL4; (+) strand; PAM type: YTN; PAM sequence: CTC
  source 1..20: mol_type = other DNA
cttgccagtgctctgagcca

SEQ ID NO: 16617 - DNA, 20 bp, synthetic construct
  misc_feature 1..20: note = Description of Artificial Sequence: Synthetic oligonucleotide
  misc_feature 1..20: note = Target: ANGPTL4; (+) strand; PAM type: YTN; PAM sequence: CTT
  source 1..20: mol_type = other DNA
gccagtgctctgagccaacc

SEQ ID NO: 16618 - DNA, 20 bp, synthetic construct
  misc_feature 1..20: note = Description of Artificial Sequence: Synthetic oligonucleotide
  misc_feature 1..20: note = Target: ANGPTL4; (+) strand; PAM type: YTN; PAM sequence: TTG
  source 1..20: mol_type = other DNA
ccagtgctctgagccaacct

SEQ ID NO: 16619 - DNA, 20 bp, synthetic construct
  misc_feature 1..20: note = Description of Artificial Sequence: Synthetic oligonucleotide
  misc_feature 1..20: note = Target: ANGPTL4; (+) strand; PAM type: YTN; PAM sequence: CTC
  source 1..20: mol_type = other DNA
tgagccaacctgccccgagt

SEQ ID NO: 16620 - DNA, 20 bp, synthetic construct
  misc_feature 1..20: note = Description of Artificial Sequence: Synthetic oligonucleotide
  misc_feature 1..20: note = Target: ANGPTL4; (+) strand; PAM type: YTN; PAM sequence: CTG
  source 1..20: mol_type = other DNA
agccaacctgccccgagttc

SEQ ID NO: 16621 - DNA, 20 bp, synthetic construct
  misc_feature 1..20: note = Description of Artificial Sequence: Synthetic oligonucleotide
  misc_feature 1..20: note = Target: ANGPTL4; (+) strand; PAM type: YTN; PAM sequence: CTG
  source 1..20: mol_type = other DNA
ccccgagttcttcctggcag

SEQ ID NO: 16622 - DNA, 20 bp, synthetic construct
  misc_feature 1..20: note = Description of Artificial Sequence: Synthetic oligonucleotide
  misc_feature 1..20: note = Target: ANGPTL4; (+) strand; PAM type: YTN; PAM sequence: TTC
  source 1..20: mol_type = other DNA
ttcctggcaggctggttttc

SEQ ID NO: 16623 - DNA, 20 bp, synthetic construct
  misc_feature 1..20: note = Description of Artificial Sequence: Synthetic oligonucleotide
  misc_feature 1..20: note = Target: ANGPTL4; (+) strand; PAM type: YTN; PAM sequence: CTT
  source 1..20: mol_type = other DNA
cctggcaggctggttttctg

SEQ ID NO: 16624 - DNA, 20 bp, synthetic construct
  misc_feature 1..20: note = Description of Artificial Sequence: Synthetic oligonucleotide
  misc_feature 1..20: note = Target: ANGPTL4; (+) strand; PAM type: YTN; PAM sequence: TTC
  source 1..20: mol_type = other DNA
ctggcaggctggttttctgt

SEQ ID NO: 16625 - DNA, 20 bp, synthetic construct
  misc_feature 1..20: note = Description of Artificial Sequence: Synthetic oligonucleotide
  misc_feature 1..20: note = Target: ANGPTL4; (+) strand; PAM type: YTN; PAM sequence: CTG
  source 1..20: mol_type = other DNA
gcaggctggttttctgtgcc

SEQ ID NO: 16626 - DNA, 20 bp, synthetic construct
  misc_feature 1..20: note = Description of Artificial Sequence: Synthetic oligonucleotide
  misc_feature 1..20: note = Target: ANGPTL4; (+) strand; PAM type: YTN; PAM sequence: CTG
  source 1..20: mol_type = other DNA
gttttctgtgccagcctccc

SEQ ID NO: 16627 - DNA, 20 bp, synthetic construct
  misc_feature 1..20: note = Description of Artificial Sequence: Synthetic oligonucleotide
  misc_feature 1..20: note = Target: ANGPTL4; (+) strand; PAM type: YTN; PAM sequence: TTT
  source 1..20: mol_type = other DNA
tctgtgccagcctccccttc

SEQ ID NO: 16628 - DNA, 20 bp, synthetic construct
  misc_feature 1..20: note = Description of Artificial Sequence: Synthetic oligonucleotide
  misc_feature 1..20: note = Target: ANGPTL4; (+) strand; PAM type: YTN; PAM sequence: TTT
  source 1..20: mol_type = other DNA
ctgtgccagcctccccttcc

SEQ ID NO: 16629 - DNA, 20 bp, synthetic construct
  misc_feature 1..20: note = Description of Artificial Sequence: Synthetic oligonucleotide
  misc_feature 1..20: note = Target: ANGPTL4; (+) strand; PAM type: YTN; PAM sequence: TTC
  source 1..20: mol_type = other DNA
tgtgccagcctccccttcct

SEQ ID NO: 16630 - DNA, 20 bp, synthetic construct
  misc_feature 1..20: note = Description of Artificial Sequence: Synthetic oligonucleotide
  misc_feature 1..20: note = Target: ANGPTL4; (+) strand; PAM type: YTN; PAM sequence: CTG
  source 1..20: mol_type = other DNA
tgccagcctccccttcctga

SEQ ID NO: 16631 - DNA, 20 bp, synthetic construct
  misc_feature 1..20: note = Description of Artificial Sequence: Synthetic oligonucleotide
  misc_feature 1..20: note = Target: ANGPTL4; (+) strand; PAM type: YTN; PAM sequence: CTC
  source 1..20: mol_type = other DNA
cccttcctgacagggtatag

SEQ ID NO: 16632 - DNA, 20 bp, synthetic construct
  misc_feature 1..20: note = Description of Artificial Sequence: Synthetic oligonucleotide
  misc_feature 1..20: note = Target: ANGPTL4; (+) strand; PAM type: YTN; PAM sequence: CTT
  source 1..20: mol_type = other DNA
cctgacagggtataggggaa

SEQ ID NO: 16633 - DNA, 20 bp, synthetic construct
  misc_feature 1..20: note = Description of Artificial Sequence: Synthetic oligonucleotide
  misc_feature 1..20: note = Target: ANGPTL4; (+) strand; PAM type: YTN; PAM sequence: TTC
  source 1..20: mol_type = other DNA
ctgacagggtataggggaat

SEQ ID NO: 16634 - DNA, 20 bp, synthetic construct
  misc_feature 1..20: note = Description of Artificial Sequence: Synthetic oligonucleotide
  misc_feature 1..20: note = Target: ANGPTL4; (+) strand; PAM type: YTN; PAM sequence: CTG
  source 1..20: mol_type = other DNA
acagggtataggggaatggg

SEQ ID NO: 16635 - DNA, 20 bp, synthetic construct
  misc_feature 1..20: note = Description of Artificial Sequence: Synthetic oligonucleotide
  misc_feature 1..20: note = Target: ANGPTL4; (+) strand; PAM type: YTN; PAM sequence: TTT
  source 1..20: mol_type = other DNA
gaatgaacacttagccctgt

SEQ ID NO: 16636 - DNA, 20 bp, synthetic construct
  misc_feature 1..20: note = Description of Artificial Sequence: Synthetic oligonucleotide
  misc_feature 1..20: note = Target: ANGPTL4; (+) strand; PAM type: YTN; PAM sequence: TTG
  source 1..20: mol_type = other DNA
aatgaacacttagccctgtg

SEQ ID NO: 16637 - DNA, 20 bp, synthetic construct
  misc_feature 1..20: note = Description of Artificial Sequence: Synthetic oligonucleotide
  misc_feature 1..20: note = Target: ANGPTL4; (+) strand; PAM type: YTN; PAM sequence: CTT
  source 1..20: mol_type = other DNA
agccctgtggaatgaatgtg

SEQ ID NO: 16638 - DNA, 20 bp, synthetic construct
  misc_feature 1..20: note = Description of Artificial Sequence: Synthetic oligonucleotide
  misc_feature 1..20: note = Target: ANGPTL4; (+) strand; PAM type: YTN; PAM sequence: TTA
  source 1..20: mol_type = other DNA
gccctgtggaatgaatgtgg

SEQ ID NO: 16639 - DNA, 20 bp, synthetic construct
  misc_feature 1..20: note = Description of Artificial Sequence: Synthetic oligonucleotide
  misc_feature 1..20: note = Target: ANGPTL4; (+) strand; PAM type: YTN; PAM sequence: CTG
  source 1..20: mol_type = other DNA
tggaatgaatgtggtccagc

SEQ ID NO: 16640 - DNA, 20 bp, synthetic construct
  misc_feature 1..20: note = Description of Artificial Sequence: Synthetic oligonucleotide
  misc_feature 1..20: note = Target: ANGPTL4; (+) strand; PAM type: YTN; PAM sequence: CTT
  source 1..20: mol_type = other DNA
tagcctcactcagtacttcc

SEQ ID NO: 16641 - DNA, 20 bp, synthetic construct
  misc_feature 1..20: note = Description of Artificial Sequence: Synthetic oligonucleotide
  misc_feature 1..20: note = Target: ANGPTL4; (+) strand; PAM type: YTN; PAM sequence: TTT
  source 1..20: mol_type = other DNA
agcctcactcagtacttcct

SEQ ID NO: 16642 - DNA, 20 bp, synthetic construct
  misc_feature 1..20: note = Description of Artificial Sequence: Synthetic oligonucleotide
  misc_feature 1..20: note = Target: ANGPTL4; (+) strand; PAM type: YTN; PAM sequence: TTA
  source 1..20: mol_type = other DNA
gcctcactcagtacttcctt

SEQ ID NO: 16643 - DNA, 20 bp, synthetic construct
  misc_feature 1..20: note = Description of Artificial Sequence: Synthetic oligonucleotide
  misc_feature 1..20: note = Target: ANGPTL4; (+) strand; PAM type: YTN; PAM sequence: CTC
  source 1..20: mol_type = other DNA
actcagtacttcctttgtcc

SEQ ID NO: 16644 - DNA, 20 bp, synthetic construct
  misc_feature 1..20: note = Description of Artificial Sequence: Synthetic oligonucleotide
  misc_feature 1..20: note = Target: ANGPTL4; (+) strand; PAM type: YTN; PAM sequence: CTC
  source 1..20: mol_type = other DNA
agtacttcctttgtcccaac

SEQ ID NO: 16645 - DNA, 20 bp, synthetic construct
  misc_feature 1..20: note = Description of Artificial Sequence: Synthetic oligonucleotide
  misc_feature 1..20: note = Target: ANGPTL4; (+) strand; PAM type: YTN; PAM sequence: CTT
  source 1..20: mol_type = other DNA
cctttgtcccaactctatcc

SEQ ID NO: 16646 - DNA, 20 bp, synthetic construct
  misc_feature 1..20: note = Description of Artificial Sequence: Synthetic oligonucleotide
  misc_feature 1..20: note = Target: ANGPTL4; (+) strand; PAM type: YTN; PAM sequence: TTC
  source 1..20: mol_type = other DNA
ctttgtcccaactctatccc

SEQ ID NO: 16647 - DNA, 20 bp, synthetic construct
  misc_feature 1..20: note = Description of Artificial Sequence: Synthetic oligonucleotide
  misc_feature 1..20: note = Target: ANGPTL4; (+) strand; PAM type: YTN; PAM sequence: CTT
  source 1..20: mol_type = other DNA
tgtcccaactctatccctac

SEQ ID NO: 16648 - DNA, 20 bp, synthetic construct
  misc_feature 1..20: note = Description of Artificial Sequence: Synthetic oligonucleotide
  misc_feature 1..20: note = Target: ANGPTL4; (+) strand; PAM type: YTN; PAM sequence: TTT
  source 1..20: mol_type = other DNA
gtcccaactctatccctacc

SEQ ID NO: 16649 - DNA, 20 bp, synthetic construct
  misc_feature 1..20: note = Description of Artificial Sequence: Synthetic oligonucleotide
  misc_feature 1..20: note = Target: ANGPTL4; (+) strand; PAM type: YTN; PAM sequence: TTG
  source 1..20: mol_type = other DNA
tcccaactctatccctaccc

SEQ ID NO: 16650 - DNA, 20 bp, synthetic construct
  misc_feature 1..20: note = Description of Artificial Sequence: Synthetic oligonucleotide
  misc_feature 1..20: note = Target: ANGPTL4; (+) strand; PAM type: YTN; PAM sequence: CTC
  source 1..20: mol_type = other DNA
tatccctaccccaggctcag

SEQ ID NO: 16651 - DNA, 20 bp, synthetic construct
  misc_feature 1..20: note = Description of Artificial Sequence: Synthetic oligonucleotide
  misc_feature 1..20: note = Target: ANGPTL4; (+) strand; PAM type: YTN; PAM sequence: CTA
  source 1..20: mol_type = other DNA
tccctaccccaggctcagaa

SEQ ID NO: 16652 - DNA, 20 bp, synthetic construct
  misc_feature 1..20: note = Description of Artificial Sequence: Synthetic oligonucleotide
  misc_feature 1..20: note = Target: ANGPTL4; (+) strand; PAM type: YTN; PAM sequence: CTA
  source 1..20: mol_type = other DNA
ccccaggctcagaatgttgg

SEQ ID NO: 16653 - DNA, 20 bp, synthetic construct
  misc_feature 1..20: note = Description of Artificial Sequence: Synthetic oligonucleotide
  misc_feature 1..20: note = Target: ANGPTL4; (+) strand; PAM type: YTN; PAM sequence: CTC
  source 1..20: mol_type = other DNA
agaatgttggggtatctcca

SEQ ID NO: 16654 - DNA, 20 bp, synthetic construct
  misc_feature 1..20: note = Description of Artificial Sequence: Synthetic oligonucleotide
  misc_feature 1..20: note = Target: ANGPTL4; (+) strand; PAM type: YTN; PAM sequence: TTG
  source 1..20: mol_type = other DNA
gggtatctccacctgcctga

SEQ ID NO: 16655 - DNA, 20 bp, synthetic construct
  misc_feature 1..20: note = Description of Artificial Sequence: Synthetic oligonucleotide
  misc_feature 1..20: note = Target: ANGPTL4; (+) strand; PAM type: YTN; PAM sequence: CTC
  source 1..20: mol_type = other DNA
cacctgcctgagaacttcaa

SEQ ID NO: 16656 - DNA, 20 bp, synthetic construct
  misc_feature 1..20: note = Description of Artificial Sequence: Synthetic oligonucleotide
  misc_feature 1..20: note = Target: ANGPTL4; (+) strand; PAM type: YTN; PAM sequence: CTG
  source 1..20: mol_type = other DNA
cctgagaacttcaaacatac

SEQ ID NO: 16657 - DNA, 20 bp, synthetic construct
  misc_feature 1..20: note = Description of Artificial Sequence: Synthetic oligonucleotide
  misc_feature 1..20: note = Target: ANGPTL4; (+) strand; PAM type: YTN; PAM sequence: CTG
  source 1..20: mol_type = other DNA
agaacttcaaacatacaggg

SEQ ID NO: 16658 - DNA, 20 bp, synthetic construct
  misc_feature 1..20: note = Description of Artificial Sequence: Synthetic oligonucleotide
  misc_feature 1..20: note = Target: ANGPTL4; (+) strand; PAM type: YTN; PAM sequence: CTT
  source 1..20: mol_type = other DNA
caaacatacaggggctgggc

SEQ ID NO: 16659 - DNA, 20 bp, synthetic construct
  misc_feature 1..20: note = Description of Artificial Sequence: Synthetic oligonucleotide
  misc_feature 1..20: note = Target: ANGPTL4; (+) strand; PAM type: YTN; PAM sequence: TTC
  source 1..20: mol_type = other DNA
aaacatacaggggctgggct

SEQ ID NO: 16660 - DNA, 20 bp, synthetic construct
  misc_feature 1..20: note = Description of Artificial Sequence: Synthetic oligonucleotide
  misc_feature 1..20: note = Target: ANGPTL4; (+) strand; PAM type: YTN; PAM sequence: CTG
  source 1..20: mol_type = other DNA
ggcttagagggcagcagcac

SEQ ID NO: 16661 - DNA, 20 bp, synthetic construct
  misc_feature 1..20: note = Description of Artificial Sequence: Synthetic oligonucleotide
  misc_feature 1..20: note = Target: ANGPTL4; (+) strand; PAM type: YTN; PAM sequence: CTT
  source 1..20: mol_type = other DNA
agagggcagcagcaccttcg

SEQ ID NO: 16662 - DNA, 20 bp, synthetic construct
  misc_feature 1..20: note = Description of Artificial Sequence: Synthetic oligonucleotide
  misc_feature 1..20: note = Target: ANGPTL4; (+) strand; PAM type: YTN; PAM sequence: TTA
  source 1..20: mol_type = other DNA
gagggcagcagcaccttcgt

SEQ ID NO: 16663 - DNA, 20 bp, synthetic construct
  misc_feature 1..20: note = Description of Artificial Sequence: Synthetic oligonucleotide
  misc_feature 1..20: note = Target: ANGPTL4; (+) strand; PAM type: YTN; PAM sequence: CTT
  source 1..20: mol_type = other DNA
cgttcagtgcatgagtgaat

SEQ ID NO: 16664 - DNA, 20 bp, synthetic construct
  misc_feature 1..20: note = Description of Artificial Sequence: Synthetic oligonucleotide
  misc_feature 1..20: note = Target: ANGPTL4; (+) strand; PAM type: YTN; PAM sequence: TTC
  source 1..20: mol_type = other DNA
gttcagtgcatgagtgaatg

SEQ ID NO: 16665 - DNA, 20 bp, synthetic construct
  misc_feature 1..20: note = Description of Artificial Sequence: Synthetic oligonucleotide
  misc_feature 1..20: note = Target: ANGPTL4; (+) strand; PAM type: YTN; PAM sequence: TTC
  source 1..20: mol_type = other DNA
agtgcatgagtgaatgaatg

SEQ ID NO: 16666 - DNA, 20 bp, synthetic construct
  misc_feature 1..20: note = Description of Artificial Sequence: Synthetic oligonucleotide
  misc_feature 1..20: note = Target: ANGPTL4; (+) strand; PAM type: YTN; PAM sequence: CTT
  source 1..20: mol_type = other DNA
ccatgtctgaaacttttttt

SEQ ID NO: 16667 - DNA, 20 bp, synthetic construct
  misc_feature 1..20: note = Description of Artificial Sequence: Synthetic oligonucleotide
  misc_feature 1..20: note = Target: ANGPTL4; (+) strand; PAM type: YTN; PAM sequence: TTC
  source 1..20: mol_type = other DNA
catgtctgaaactttttttt

SEQ ID NO: 16668 - DNA, 20 bp, synthetic construct
  misc_feature 1..20: note = Description of Artificial Sequence: Synthetic oligonucleotide
  misc_feature 1..20: note = Target: ANGPTL4; (+) strand; PAM type: YTN; PAM sequence: CTG
  source 1..20: mol_type = other DNA
aaactttttttttttttttt

SEQ ID NO: 16669 - DNA, 20 bp, synthetic construct
  misc_feature 1..20: note = Description of Artificial Sequence: Synthetic oligonucleotide
  misc_feature 1..20: note = Target: ANGPTL4; (+) strand; PAM type: YTN; PAM sequence: CTT
  source 1..20: mol_type = other DNA
ttttttttttttttgacaca

SEQ ID NO: 16670 - DNA, 20 bp, synthetic construct
  misc_feature 1..20: note = Description of Artificial Sequence: Synthetic oligonucleotide
  misc_feature 1..20: note = Target: ANGPTL4; (+) strand; PAM type: YTN; PAM sequence: TTT
  source 1..20: mol_type = other DNA
tttttttttttttgacacac

SEQ ID NO: 16671 - DNA, 20 bp, synthetic construct
  misc_feature 1..20: note = Description of Artificial Sequence: Synthetic oligonucleotide
  misc_feature 1..20: note = Target: ANGPTL4; (+) strand; PAM type: YTN; PAM sequence: TTT
  source 1..20: mol_type = other DNA
ttttttttttttgacacaca

SEQ ID NO: 16672 - DNA, 20 bp, synthetic construct
  misc_feature 1..20: note = Description of Artificial Sequence: Synthetic oligonucleotide
  misc_feature 1..20: note = Target: ANGPTL4; (+) strand; PAM type: YTN; PAM sequence: TTT
  source 1..20: mol_type = other DNA
tttttttttttgacacacag

SEQ ID NO: 16673 - DNA, 20 bp, synthetic construct
  misc_feature 1..20: note = Description of Artificial Sequence: Synthetic oligonucleotide
  misc_feature 1..20: note = Target: ANGPTL4; (+) strand; PAM type: YTN; PAM sequence: TTT
  source 1..20: mol_type = other DNA
ttttttttttgacacacagt

SEQ ID NO: 16674 - DNA, 20 bp, synthetic construct
  misc_feature 1..20: note = Description of Artificial Sequence: Synthetic oligonucleotide
  misc_feature 1..20: note = Target: ANGPTL4; (+) strand; PAM type: YTN; PAM sequence: TTT
  source 1..20: mol_type = other DNA
tttttttttgacacacagtc

SEQ ID NO: 16675 - DNA, 20 bp, synthetic construct
  misc_feature 1..20: note = Description of Artificial Sequence: Synthetic oligonucleotide
  misc_feature 1..20: note = Target: ANGPTL4; (+) strand; PAM type: YTN; PAM sequence: TTT
  source 1..20: mol_type = other DNA
ttttttttgacacacagtct

SEQ ID NO: 16676 - DNA, 20 bp, synthetic construct
  misc_feature 1..20: note = Description of Artificial Sequence: Synthetic oligonucleotide
  misc_feature 1..20: note = Target: ANGPTL4; (+) strand; PAM type: YTN; PAM sequence: TTT
  source 1..20: mol_type = other DNA
tttttttgacacacagtctc

SEQ ID NO: 16677 - DNA, 20 bp, synthetic construct
  misc_feature 1..20: note = Description of Artificial Sequence: Synthetic oligonucleotide
  misc_feature 1..20: note = Target: ANGPTL4; (+) strand; PAM type: YTN; PAM sequence: TTT
  source 1..20: mol_type = other DNA
ttttttgacacacagtctca

SEQ ID NO: 16678 - DNA, 20 bp, synthetic construct
  misc_feature 1..20: note = Description of Artificial Sequence: Synthetic oligonucleotide
  misc_feature 1..20: note = Target: ANGPTL4; (+) strand; PAM type: YTN; PAM sequence: TTT
  source 1..20: mol_type = other DNA
tttttgacacacagtctcac

SEQ ID NO: 16679 - DNA, 20 bp, synthetic construct
  misc_feature 1..20: note = Description of Artificial Sequence: Synthetic oligonucleotide
  misc_feature 1..20: note = Target: ANGPTL4; (+) strand; PAM type: YTN; PAM sequence: TTT
  source 1..20: mol_type = other DNA
ttttgacacacagtctcact

SEQ ID NO: 16680 - DNA, 20 bp, synthetic construct
  misc_feature 1..20: note = Description of Artificial Sequence: Synthetic oligonucleotide
  misc_feature 1..20: note = Target: ANGPTL4; (+) strand; PAM type: YTN; PAM sequence: TTT
  source 1..20: mol_type = other DNA
tttgacacacagtctcactc

SEQ ID NO: 16681 - DNA, 20 bp, synthetic construct
  misc_feature 1..20: note = Description of Artificial Sequence: Synthetic oligonucleotide
  misc_feature 1..20: note = Target: ANGPTL4; (+) strand; PAM type: YTN; PAM sequence: TTT
  source 1..20: mol_type = other DNA
ttgacacacagtctcactct

SEQ ID NO: 16682 - DNA, 20 bp, synthetic construct
  misc_feature 1..20: note = Description of Artificial Sequence: Synthetic oligonucleotide
  misc_feature 1..20: note = Target: ANGPTL4; (+) strand; PAM type: YTN; PAM sequence: TTT
  source 1..20: mol_type = other DNA
tgacacacagtctcactctg

SEQ ID NO: 16683 - DNA, 20 bp, synthetic construct
  misc_feature 1..20: note = Description of Artificial Sequence: Synthetic oligonucleotide
  misc_feature 1..20: note = Target: ANGPTL4; (+) strand; PAM type: YTN; PAM sequence: TTT
  source 1..20: mol_type = other DNA
gacacacagtctcactctgt

SEQ ID NO: 16684 - DNA, 20 bp, synthetic construct
  misc_feature 1..20: note = Description of Artificial Sequence: Synthetic oligonucleotide
  misc_feature 1..20: note = Target: ANGPTL4; (+) strand; PAM type: YTN; PAM sequence: TTG
  source 1..20: mol_type = other DNA
acacacagtctcactctgtc

SEQ ID NO: 16685 - DNA, 20 bp, synthetic construct
  misc_feature 1..20: note = Description of Artificial Sequence: Synthetic oligonucleotide
  misc_feature 1..20: note = Target: ANGPTL4; (+) strand; PAM type: YTN; PAM sequence: CTC
  source 1..20: mol_type = other DNA
actctgtcacccaggctgga

SEQ ID NO: 16686 - DNA, 20 bp, synthetic construct
  misc_feature 1..20: note = Description of Artificial Sequence: Synthetic oligonucleotide
  misc_feature 1..20: note = Target: ANGPTL4; (+) strand; PAM type: YTN; PAM sequence: CTC
  source 1..20: mol_type = other DNA
tgtcacccaggctggagtgc

SEQ ID NO: 16687 - DNA, 20 bp, synthetic construct
  misc_feature 1..20: note = Description of Artificial Sequence: Synthetic oligonucleotide
  misc_feature 1..20: note = Target: ANGPTL4; (+) strand; PAM type: YTN; PAM sequence: CTG
  source 1..20: mol_type = other DNA
tcacccaggctggagtgctg

SEQ ID NO: 16688 - DNA, 20 bp, synthetic construct
  misc_feature 1..20: note = Description of Artificial Sequence: Synthetic oligonucleotide
  misc_feature 1..20: note = Target: ANGPTL4; (+) strand; PAM type: YTN; PAM sequence: CTG
  source 1..20: mol_type = other DNA
gagtgctgtggtgcaatctc

SEQ ID NO: 16689 - DNA, 20 bp, synthetic construct
  misc_feature 1..20: note = Description of Artificial Sequence: Synthetic oligonucleotide
  misc_feature 1..20: note = Target: ANGPTL4; (+) strand; PAM type: YTN; PAM sequence: CTG
  source 1..20: mol_type = other DNA
tggtgcaatctcagctcact

SEQ ID NO: 16690 - DNA, 20 bp, synthetic construct
  misc_feature 1..20: note = Description of Artificial Sequence: Synthetic oligonucleotide
  misc_feature 1..20: note = Target: ANGPTL4; (+) strand; PAM type: YTN; PAM sequence: CTC
  source 1..20: mol_type = other DNA
agctcactgcaacctccgtc

SEQ ID NO: 16691 - DNA, 20 bp, synthetic construct
  misc_feature 1..20: note = Description of Artificial Sequence: Synthetic oligonucleotide
  misc_feature 1..20: note = Target: ANGPTL4; (+) strand; PAM type: YTN; PAM sequence: CTC
  source 1..20: mol_type = other DNA
actgcaacctccgtctcctg

SEQ ID NO: 16692 - DNA, 20 bp, synthetic construct
  misc_feature 1..20: note = Description of Artificial Sequence: Synthetic oligonucleotide
  misc_feature 1..20: note = Target: ANGPTL4; (+) strand; PAM type: YTN; PAM sequence: CTG
  source 1..20: mol_type = other DNA
caacctccgtctcctgagtt

SEQ ID NO: 16693 - DNA, 20 bp, synthetic construct
  misc_feature 1..20: note = Description of Artificial Sequence: Synthetic oligonucleotide
  misc_feature 1..20: note = Target: ANGPTL4; (+) strand; PAM type: YTN; PAM sequence: CTC
  source 1..20: mol_type = other DNA
cgtctcctgagttcaagcga

SEQ ID NO: 16694 - DNA, 20 bp, synthetic construct
  misc_feature 1..20: note = Description of Artificial Sequence: Synthetic oligonucleotide
  misc_feature 1..20: note = Target: ANGPTL4; (+) strand; PAM type: YTN; PAM sequence: CTC
  source 1..20: mol_type = other DNA
ctgagttcaagcgattctcc

SEQ ID NO: 16695 - DNA, 20 bp, synthetic construct
  misc_feature 1..20: note = Description of Artificial Sequence: Synthetic oligonucleotide
  misc_feature 1..20: note = Target: ANGPTL4; (+) strand; PAM type: YTN; PAM sequence: CTG
  source 1..20: mol_type = other DNA
agttcaagcgattctcctga

SEQ ID NO: 16696 - DNA, 20 bp, synthetic construct
  misc_feature 1..20: note = Description of Artificial Sequence: Synthetic oligonucleotide
  misc_feature 1..20: note = Target: ANGPTL4; (+) strand; PAM type: YTN; PAM sequence: TTC
  source 1..20: mol_type = other DNA
aagcgattctcctgacacag

SEQ ID NO: 16697 - DNA, 20 bp, synthetic construct
  misc_feature 1..20: note = Description of Artificial Sequence: Synthetic oligonucleotide
  misc_feature 1..20: note = Target: ANGPTL4; (+) strand; PAM type: YTN; PAM sequence: TTC
  source 1..20: mol_type = other DNA
tcctgacacagtctcccgag

SEQ ID NO: 16698 - DNA, 20 bp, synthetic construct
  misc_feature 1..20: note = Description of Artificial Sequence: Synthetic oligonucleotide
  misc_feature 1..20: note = Target: ANGPTL4; (+) strand; PAM type: YTN; PAM sequence: CTC
  source 1..20: mol_type = other DNA
ctgacacagtctcccgagta

SEQ ID NO: 16699 - DNA, 20 bp, synthetic construct
  misc_feature 1..20: note = Description of Artificial Sequence: Synthetic oligonucleotide
  misc_feature 1..20: note = Target: ANGPTL4; (+) strand; PAM type: YTN; PAM sequence: CTG
  source 1..20: mol_type = other DNA
acacagtctcccgagtagct

SEQ ID NO: 16700 - DNA, 20 bp, synthetic construct
  misc_feature 1..20: note = Description of Artificial Sequence: Synthetic oligonucleotide
  misc_feature 1..20: note = Target: ANGPTL4; (+) strand; PAM type: YTN; PAM sequence: CTC
  source 1..20: mol_type = other DNA
ccgagtagctgtaagcacgt

SEQ ID NO: 16701 - DNA, 20 bp, synthetic construct
  misc_feature 1..20: note = Description of Artificial Sequence: Synthetic oligonucleotide
  misc_feature 1..20: note = Target: ANGPTL4; (+) strand; PAM type: YTN; PAM sequence: CTG
  source 1..20: mol_type = other DNA
taagcacgtgccaccacacc

SEQ ID NO: 16702 - DNA, 20 bp, synthetic construct
  misc_feature 1..20: note = Description of Artificial Sequence: Synthetic oligonucleotide
  misc_feature 1..20: note = Target: ANGPTL4; (+) strand; PAM type: YTN; PAM sequence: CTA
  source 1..20: mol_type = other DNA
attttttatttttagtagag

SEQ ID NO: 16703 - DNA, 20 bp, synthetic construct
  misc_feature 1..20: note = Description of Artificial Sequence: Synthetic oligonucleotide
  misc_feature 1..20: note = Target: ANGPTL4; (+) strand; PAM type: YTN; PAM sequence: TTT
  source 1..20: mol_type = other DNA
tttatttttagtagagacga

SEQ ID NO: 16704 - DNA, 20 bp, synthetic construct
  misc_feature 1..20: note = Description of Artificial Sequence: Synthetic oligonucleotide
  misc_feature 1..20: note = Target: ANGPTL4; (+) strand; PAM type: YTN; PAM sequence: TTT
  source 1..20: mol_type = other DNA
ttatttttagtagagacgag

SEQ ID NO: 16705 - DNA, 20 bp, synthetic construct
  misc_feature 1..20: note = Description of Artificial Sequence: Synthetic oligonucleotide
  misc_feature 1..20: note = Target: ANGPTL4; (+) strand; PAM type: YTN; PAM sequence: TTT
  source 1..20: mol_type = other DNA
tatttttagtagagacgagg

SEQ ID NO: 16706 - DNA, 20 bp, synthetic construct
  misc_feature 1..20: note = Description of Artificial Sequence: Synthetic oligonucleotide
  misc_feature 1..20: note = Target: ANGPTL4; (+) strand; PAM type: YTN; PAM sequence: TTT
  source 1..20: mol_type = other DNA
atttttagtagagacgaggt

SEQ ID NO: 16707 - DNA, 20 bp, synthetic construct
  misc_feature 1..20: note = Description of Artificial Sequence: Synthetic oligonucleotide
  misc_feature 1..20: note = Target: ANGPTL4; (+) strand; PAM type: YTN; PAM sequence: TTA
  source 1..20: mol_type = other DNA
tttttagtagagacgaggtt

SEQ ID NO: 16708 - DNA, 20 bp, synthetic construct
  misc_feature 1..20: note = Description of Artificial Sequence: Synthetic oligonucleotide
  misc_feature 1..20: note = Target: ANGPTL4; (+) strand; PAM type: YTN; PAM sequence: TTT
  source 1..20: mol_type = other DNA
ttagtagagacgaggtttca

SEQ ID NO: 16709 - DNA, 20 bp, synthetic construct
  misc_feature 1..20: note = Description of Artificial Sequence: Synthetic oligonucleotide
  misc_feature 1..20: note = Target: ANGPTL4; (+) strand; PAM type: YTN; PAM sequence: TTT
  source 1..20: mol_type = other DNA
tagtagagacgaggtttcac

SEQ ID NO: 16710 - DNA, 20 bp, synthetic construct
  misc_feature 1..20: note = Description of Artificial Sequence: Synthetic oligonucleotide
  misc_feature 1..20: note = Target: ANGPTL4; (+) strand; PAM type: YTN; PAM sequence: TTT
  source 1..20: mol_type = other DNA
agtagagacgaggtttcacc

SEQ ID NO: 16711 - DNA, 20 bp, synthetic construct
  misc_feature 1..20: note = Description of Artificial Sequence: Synthetic oligonucleotide
  misc_feature 1..20: note = Target: ANGPTL4; (+) strand; PAM type: YTN; PAM sequence: TTA
  source 1..20: mol_type = other DNA
gtagagacgaggtttcacca

SEQ ID NO: 16712 - DNA, 20 bp, synthetic construct
  misc_feature 1..20: note = Description of Artificial Sequence: Synthetic oligonucleotide
  misc_feature 1..20: note = Target: ANGPTL4; (+) strand; PAM type: YTN; PAM sequence: TTT
  source 1..20: mol_type = other DNA
caccatgttggccaggctga

SEQ ID NO: 16713 - DNA, 20 bp, synthetic construct
  misc_feature 1..20: note = Description of Artificial Sequence: Synthetic oligonucleotide
  misc_feature 1..20: note = Target: ANGPTL4; (+) strand; PAM type: YTN; PAM sequence: TTC
  source 1..20: mol_type = other DNA
accatgttggccaggctgat

SEQ ID NO: 16714 - DNA, 20 bp, synthetic construct
  misc_feature 1..20: note = Description of Artificial Sequence: Synthetic oligonucleotide
  misc_feature 1..20: note = Target: ANGPTL4; (+) strand; PAM type: YTN; PAM sequence: TTG
  source 1..20: mol_type = other DNA
gccaggctgatctcgaaccc

SEQ ID NO: 16715 - DNA, 20 bp, synthetic construct
  misc_feature 1..20: note = Description of Artificial Sequence: Synthetic oligonucleotide
  misc_feature 1..20: note = Target: ANGPTL4; (+) strand; PAM type: YTN; PAM sequence: CTG
  source 1..20: mol_type = other DNA
atctcgaacccctgacctca

SEQ ID NO: 16716 - DNA, 20 bp, synthetic construct
  misc_feature 1..20: note = Description of Artificial Sequence: Synthetic oligonucleotide
  misc_feature 1..20: note = Target: ANGPTL4; (+) strand; PAM type: YTN; PAM sequence: CTC
  source 1..20: mol_type = other DNA
gaacccctgacctcaggtga

SEQ ID NO: 16717 - DNA, 20 bp, synthetic construct
  misc_feature 1..20: note = Description of Artificial Sequence: Synthetic oligonucleotide
  misc_feature 1..20: note = Target: ANGPTL4; (+) strand; PAM type: YTN; PAM sequence: CTG
  source 1..20: mol_type = other DNA
acctcaggtgatccgccccc

SEQ ID NO: 16718 - DNA, 20 bp, synthetic construct
  misc_feature 1..20: note = Description of Artificial Sequence: Synthetic oligonucleotide
  misc_feature 1..20: note = Target: ANGPTL4; (+) strand; PAM type: YTN; PAM sequence: CTC
  source 1..20: mol_type = other DNA
aggtgatccgcccccccccc

SEQ ID NO: 16719 - DNA, 20 bp, synthetic construct
  misc_feature 1..20: note = Description of Artificial Sequence: Synthetic oligonucleotide
  misc_feature 1..20: note = Target: ANGPTL4; (+) strand; PAM type: YTN; PAM sequence: CTC
  source 1..20: mol_type = other DNA
ccaccacccggcctcccaaa

SEQ ID NO: 16720 - DNA, 20 bp, synthetic construct
  misc_feature 1..20: note = Description of Artificial Sequence: Synthetic oligonucleotide
  misc_feature 1..20: note = Target: ANGPTL4; (+) strand; PAM type: YTN; PAM sequence: CTC
  source 1..20: mol_type = other DNA
ccaaagtgctgggattacag

SEQ ID NO: 16721 - DNA, 20 bp, synthetic construct
  misc_feature 1..20: note = Description of Artificial Sequence: Synthetic oligonucleotide
  misc_feature 1..20: note = Target: ANGPTL4; (+) strand; PAM type: YTN; PAM sequence: CTG
  source 1..20: mol_type = other DNA
ggattacaggcgtgagccac

SEQ ID NO: 16722 - DNA, 20 bp, synthetic construct
  misc_feature 1..20: note = Description of Artificial Sequence: Synthetic oligonucleotide
  misc_feature 1..20: note = Target: ANGPTL4; (+) strand; PAM type: YTN; PAM sequence: TTA
  source 1..20: mol_type = other DNA
caggcgtgagccaccgcgcc

SEQ ID NO: 16723 - DNA, 20 bp, synthetic construct
  misc_feature 1..20: note = Description of Artificial Sequence: Synthetic oligonucleotide
  misc_feature 1..20: note = Target: ANGPTL4; (+) strand; PAM type: YTN; PAM sequence: CTG
  source 1..20: mol_type = other DNA
gccacagacttttattttat

SEQ ID NO: 16724 - DNA, 20 bp, synthetic construct
  misc_feature 1..20: note = Description of Artificial Sequence: Synthetic oligonucleotide
  misc_feature 1..20: note = Target: ANGPTL4; (+) strand; PAM type: YTN; PAM sequence: CTT
  source 1..20: mol_type = other DNA
ttattttatttcttttttag

SEQ ID NO: 16725 - DNA, 20 bp, synthetic construct
  misc_feature 1..20: note = Description of Artificial Sequence: Synthetic oligonucleotide
  misc_feature 1..20: note = Target: ANGPTL4; (+) strand; PAM type: YTN; PAM sequence: TTT
  source 1..20: mol_type = other DNA
tattttatttcttttttaga

SEQ ID NO: 16726 - DNA, 20 bp, synthetic construct
  misc_feature 1..20: note = Description of Artificial Sequence: Synthetic oligonucleotide
  misc_feature 1..20: note = Target: ANGPTL4; (+) strand; PAM type: YTN; PAM sequence: TTT
  source 1..20: mol_type = other DNA
attttatttcttttttagag

SEQ ID NO: 16727 - DNA, 20 bp, synthetic construct
  misc_feature 1..20: note = Description of Artificial Sequence: Synthetic oligonucleotide
  misc_feature 1..20: note = Target: ANGPTL4; (+) strand; PAM type: YTN; PAM sequence: TTA
  source 1..20: mol_type = other DNA
ttttatttcttttttagaga

SEQ ID NO: 16728 - DNA, 20 bp, synthetic construct
  misc_feature 1..20: note = Description of Artificial Sequence: Synthetic oligonucleotide
  misc_feature 1..20: note = Target: ANGPTL4; (+) strand; PAM type: YTN; PAM sequence: TTT
  source 1..20: mol_type = other DNA
tatttcttttttagagacag

SEQ ID NO: 16729 - DNA, 20 bp, synthetic construct
  misc_feature 1..20: note = Description of Artificial Sequence: Synthetic oligonucleotide
  misc_feature 1..20: note = Target: ANGPTL4; (+) strand; PAM type: YTN; PAM sequence: TTT
  source 1..20: mol_type = other DNA
atttcttttttagagacagg

SEQ ID NO: 16730 - DNA, 20 bp, synthetic construct
  misc_feature 1..20: note = Description of Artificial Sequence: Synthetic oligonucleotide
  misc_feature 1..20: note = Target: ANGPTL4; (+) strand; PAM type: YTN; PAM sequence: TTA
  source 1..20: mol_type = other DNA
tttcttttttagagacagga

SEQ ID NO: 16731 - DNA, 20 bp, synthetic construct
  misc_feature 1..20: note = Description of Artificial Sequence: Synthetic oligonucleotide
  misc_feature 1..20: note = Target: ANGPTL4; (+) strand; PAM type: YTN; PAM sequence: TTT
  source 1..20: mol_type = other DNA
cttttttagagacaggatct

SEQ ID NO: 16732 - DNA, 20 bp, synthetic construct
  misc_feature 1..20: note = Description of Artificial Sequence: Synthetic oligonucleotide
  misc_feature 1..20: note = Target: ANGPTL4; (+) strand; PAM type: YTN; PAM sequence: TTC
  source 1..20: mol_type = other DNA
ttttttagagacaggatctc

SEQ ID NO: 16733 - DNA, 20 bp, synthetic construct
  misc_feature 1..20: note = Description of Artificial Sequence: Synthetic oligonucleotide
  misc_feature 1..20: note = Target: ANGPTL4; (+) strand; PAM type: YTN; PAM sequence: CTT
  source 1..20: mol_type = other DNA
ttttagagacaggatctcac

SEQ ID NO: 16734 - DNA, 20 bp, synthetic construct
  misc_feature 1..20: note = Description of Artificial Sequence: Synthetic oligonucleotide
  misc_feature 1..20: note = Target: ANGPTL4; (+) strand; PAM type: YTN; PAM sequence: TTT
  source 1..20: mol_type = other DNA
tttagagacaggatctcact

SEQ ID NO: 16735 - DNA, 20 bp, synthetic construct
  misc_feature 1..20: note = Description of Artificial Sequence: Synthetic oligonucleotide
  misc_feature 1..20: note = Target: ANGPTL4; (+) strand; PAM type: YTN; PAM sequence: TTT
  source 1..20: mol_type = other DNA
ttagagacaggatctcactc

SEQ ID NO: 16736 - DNA, 20 bp, synthetic construct
  misc_feature 1..20: note = Description of Artificial Sequence: Synthetic oligonucleotide
  misc_feature 1..20: note = Target: ANGPTL4; (+) strand; PAM type: YTN; PAM sequence: TTT
  source 1..20: mol_type = other DNA
tagagacaggatctcactct

SEQ ID NO: 16737 - DNA, 20 bp, synthetic construct
  misc_feature 1..20: note = Description of Artificial Sequence: Synthetic oligonucleotide
  misc_feature 1..20: note = Target: ANGPTL4; (+) strand; PAM type: YTN; PAM sequence: TTT
  source 1..20: mol_type = other DNA
agagacaggatctcactctg

SEQ ID NO: 16738 - DNA, 20 bp, synthetic construct
  misc_feature 1..20: note = Description of Artificial Sequence: Synthetic oligonucleotide
  misc_feature 1..20: note = Target: ANGPTL4; (+) strand; PAM type: YTN; PAM sequence: TTA
  source 1..20: mol_type = other DNA
gagacaggatctcactctgt

SEQ ID NO: 16739 - DNA, 20 bp, synthetic construct
  misc_feature 1..20: note = Description of Artificial Sequence: Synthetic oligonucleotide
  misc_feature 1..20: note = Target: ANGPTL4; (+) strand; PAM type: YTN; PAM sequence: CTC
  source 1..20: mol_type = other DNA
actctgttgcccaggctgga

SEQ ID NO: 16740 - DNA, 20 bp, synthetic construct
  misc_feature 1..20: note = Description of Artificial Sequence: Synthetic oligonucleotide
  misc_feature 1..20: note = Target: ANGPTL4; (+) strand; PAM type: YTN; PAM sequence: CTC
  source 1..20: mol_type = other DNA
tgttgcccaggctggagtgc

SEQ ID NO: 16741 - DNA, 20 bp, synthetic construct
  misc_feature 1..20: note = Description of Artificial Sequence: Synthetic oligonucleotide
  misc_feature 1..20: note = Target: ANGPTL4; (+) strand; PAM type: YTN; PAM sequence: CTG
  source 1..20: mol_type = other DNA
ttgcccaggctggagtgcag

SEQ ID NO: 16742 - DNA, 20 bp, synthetic construct
  misc_feature 1..20: note = Description of Artificial Sequence: Synthetic oligonucleotide
  misc_feature 1..20: note = Target: ANGPTL4; (+) strand; PAM type: YTN; PAM sequence: TTG
  source 1..20: mol_type = other DNA
cccaggctggagtgcagtgg

SEQ ID NO: 16743 - DNA, 20 bp, synthetic construct
  misc_feature 1..20: note = Description of Artificial Sequence: Synthetic oligonucleotide
  misc_feature 1..20: note = Target: ANGPTL4; (+) strand; PAM type: YTN; PAM sequence: CTG
  source 1..20: mol_type = other DNA
gagtgcagtggcaccattgt

SEQ ID NO: 16744 - DNA, 20 bp, synthetic construct
  misc_feature 1..20: note = Description of Artificial Sequence: Synthetic oligonucleotide
  misc_feature 1..20: note = Target: ANGPTL4; (+) strand; PAM type: YTN; PAM sequence: TTG
  source 1..20: mol_type = other DNA
tggctcactgcagcctctac

SEQ ID NO: 16745 - DNA, 20 bp, synthetic construct
  misc_feature 1..20: note = Description of Artificial Sequence: Synthetic oligonucleotide
  misc_feature 1..20: note = Target: ANGPTL4; (+) strand; PAM type: YTN; PAM sequence: CTC
  source 1..20: mol_type = other DNA
actgcagcctctacctcctg

SEQ ID NO: 16746 - DNA, 20 bp, synthetic construct
  misc_feature 1..20: note = Description of Artificial Sequence: Synthetic oligonucleotide
  misc_feature 1..20: note = Target: ANGPTL4; (+) strand; PAM type: YTN; PAM sequence: CTG
  source 1..20: mol_type = other DNA
cagcctctacctcctgggct

SEQ ID NO: 16747 - DNA, 20 bp, synthetic construct
  misc_feature 1..20: note = Description of Artificial Sequence: Synthetic oligonucleotide
  misc_feature 1..20: note = Target: ANGPTL4; (+) strand; PAM type: YTN; PAM sequence: CTC
  source 1..20: mol_type = other DNA
tacctcctgggctcaagtga

SEQ ID NO: 16748 - DNA, 20 bp, synthetic construct
  misc_feature 1..20: note = Description of Artificial Sequence: Synthetic oligonucleotide
  misc_feature 1..20: note = Target: ANGPTL4; (+) strand; PAM type: YTN; PAM sequence: CTA
  source 1..20: mol_type = other DNA
cctcctgggctcaagtgagc

SEQ ID NO: 16749 - DNA, 20 bp, synthetic construct
  misc_feature 1..20: note = Description of Artificial Sequence: Synthetic oligonucleotide
  misc_feature 1..20: note = Target: ANGPTL4; (+) strand; PAM type: YTN; PAM sequence: CTC
  source 1..20: mol_type = other DNA
ctgggctcaagtgagcctcc

SEQ ID NO: 16750 - DNA, 20 bp, synthetic construct
  misc_feature 1..20: note = Description of Artificial Sequence: Synthetic oligonucleotide
  misc_feature 1..20: note = Target: ANGPTL4; (+) strand; PAM type: YTN; PAM sequence: CTG
  source 1..20: mol_type = other DNA
ggctcaagtgagcctcccac

SEQ ID NO: 16751 - DNA, 20 bp, synthetic construct
  misc_feature 1..20: note = Description of Artificial Sequence: Synthetic oligonucleotide
  misc_feature 1..20: note = Target: ANGPTL4; (+) strand; PAM type: YTN; PAM sequence: CTC
  source 1..20: mol_type = other DNA
aagtgagcctcccacctcag

SEQ ID NO: 16752 - DNA, 20 bp, synthetic construct
  misc_feature 1..20: note = Description of Artificial Sequence: Synthetic oligonucleotide
  misc_feature 1..20: note = Target: ANGPTL4; (+) strand; PAM type: YTN; PAM sequence: CTC
  source 1..20: mol_type = other DNA
ccacctcaggctcccaagta

SEQ ID NO: 16753 - DNA, 20 bp, synthetic construct
  misc_feature 1..20: note = Description of Artificial Sequence: Synthetic oligonucleotide
  misc_feature 1..20: note = Target: ANGPTL4; (+) strand; PAM type: YTN; PAM sequence: CTC
  source 1..20: mol_type = other DNA
aggctcccaagtagctgcga

SEQ ID NO: 16754 - DNA, 20 bp, synthetic construct
  misc_feature 1..20: note = Description of Artificial Sequence: Synthetic oligonucleotide
  misc_feature 1..20: note = Target: ANGPTL4; (+) strand; PAM type: YTN; PAM sequence: CTC
  source 1..20: mol_type = other DNA
ccaagtagctgcgaccacag

SEQ ID NO: 16755 - DNA, 20 bp, synthetic construct
  misc_feature 1..20: note = Description of Artificial Sequence: Synthetic oligonucleotide
  misc_feature 1..20: note = Target: ANGPTL4; (+) strand; PAM type: YTN; PAM sequence: CTG
  source 1..20: mol_type = other DNA
cgaccacagtcatgggcgac

SEQ ID NO: 16756 - DNA, 20 bp, synthetic construct
  misc_feature 1..20: note = Description of Artificial Sequence: Synthetic oligonucleotide
  misc_feature 1..20: note = Target: ANGPTL4; (+) strand; PAM type: YTN; PAM sequence: CTG
  source 1..20: mol_type = other DNA
gttcctcccttccttgtgtc

SEQ ID NO: 16757 - DNA, 20 bp, synthetic construct
  misc_feature 1..20: note = Description of Artificial Sequence: Synthetic oligonucleotide
  misc_feature 1..20: note = Target: ANGPTL4; (+) strand; PAM type: YTN; PAM sequence: TTC
  source 1..20: mol_type = other DNA
ctcccttccttgtgtctcct

SEQ ID NO: 16758 - DNA, 20 bp, synthetic construct
  misc_feature 1..20: note = Description of Artificial Sequence: Synthetic oligonucleotide
  misc_feature 1..20: note = Target: ANGPTL4; (+) strand; PAM type: YTN; PAM sequence: CTC
  source 1..20: mol_type = other DNA
ccttccttgtgtctcctctt

SEQ ID NO: 16759 - DNA, 20 bp, synthetic construct
  misc_feature 1..20: note = Description of Artificial Sequence: Synthetic oligonucleotide
  misc_feature 1..20: note = Target: ANGPTL4; (+) strand; PAM type: YTN; PAM sequence: CTT
  source 1..20: mol_type = other DNA
ccttgtgtctcctctttctg

SEQ ID NO: 16760 - DNA, 20 bp, synthetic construct
  misc_feature 1..20: note = Description of Artificial Sequence: Synthetic oligonucleotide
  misc_feature 1..20: note = Target: ANGPTL4; (+) strand; PAM type: YTN; PAM sequence: TTC
  source 1..20: mol_type = other DNA
cttgtgtctcctctttctgt

SEQ ID NO: 16761 - DNA, 20 bp, synthetic construct
  misc_feature 1..20: note = Description of Artificial Sequence: Synthetic oligonucleotide
  misc_feature 1..20: note = Target: ANGPTL4; (+) strand; PAM type: YTN; PAM sequence: CTT
  source 1..20: mol_type = other DNA
gtgtctcctctttctgttct

SEQ ID NO: 16762 - DNA, 20 bp, synthetic construct
  misc_feature 1..20: note = Description of Artificial Sequence: Synthetic oligonucleotide
  misc_feature 1..20: note = Target: ANGPTL4; (+) strand; PAM type: YTN; PAM sequence: TTG
  source 1..20: mol_type = other DNA
tgtctcctctttctgttctc

SEQ ID NO: 16763 - DNA, 20 bp, synthetic construct
  misc_feature 1..20: note = Description of Artificial Sequence: Synthetic oligonucleotide
  misc_feature 1..20: note = Target: ANGPTL4; (+) strand; PAM type: YTN; PAM sequence: CTC
  source 1..20: mol_type = other DNA
ctctttctgttctctaagtt

SEQ ID NO: 16764 - DNA, 20 bp, synthetic construct
  misc_feature 1..20: note = Description of Artificial Sequence: Synthetic oligonucleotide
  misc_feature 1..20: note = Target: ANGPTL4; (+) strand; PAM type: YTN; PAM sequence: CTC
  source 1..20: mol_type = other DNA
tttctgttctctaagttcct

SEQ ID NO: 16765 - DNA, 20 bp, synthetic construct
  misc_feature 1..20: note = Description of Artificial Sequence: Synthetic oligonucleotide
  misc_feature 1..20: note = Target: ANGPTL4; (+) strand; PAM type: YTN; PAM sequence: CTT
  source 1..20: mol_type = other DNA
tctgttctctaagttcctgc

SEQ ID NO: 16766 - DNA, 20 bp, synthetic construct
  misc_feature 1..20: note = Description of Artificial Sequence: Synthetic oligonucleotide
  misc_feature 1..20: note = Target: ANGPTL4; (+) strand; PAM type: YTN; PAM sequence: TTT
  source 1..20: mol_type = other DNA
ctgttctctaagttcctgct

SEQ ID NO: 16767 - DNA, 20 bp, synthetic construct
  misc_feature 1..20: note = Description of Artificial Sequence: Synthetic oligonucleotide
  misc_feature 1..20: note = Target: ANGPTL4; (+) strand; PAM type: YTN; PAM sequence: TTC
  source 1..20: mol_type = other DNA
tgttctctaagttcctgctt

SEQ ID NO: 16768 - DNA, 20 bp, synthetic construct
  misc_feature 1..20: note = Description of Artificial Sequence: Synthetic oligonucleotide
  misc_feature 1..20: note = Target: ANGPTL4; (+) strand; PAM type: YTN; PAM sequence: CTG
  source 1..20: mol_type = other DNA
ttctctaagttcctgcttta

SEQ ID NO: 16769 - DNA, 20 bp, synthetic construct
  misc_feature 1..20: note = Description of Artificial Sequence: Synthetic oligonucleotide
  misc_feature 1..20: note = Target: ANGPTL4; (+) strand; PAM type: YTN; PAM sequence: TTC
  source 1..20: mol_type = other DNA
tctaagttcctgctttatta

SEQ ID NO: 16770 - DNA, 20 bp, synthetic construct
  misc_feature 1..20: note = Description of Artificial Sequence: Synthetic oligonucleotide
  misc_feature 1..20: note = Target: ANGPTL4; (+) strand; PAM type: YTN; PAM sequence: CTC
  source 1..20: mol_type = other DNA
taagttcctgctttattata

SEQ ID NO: 16771 - DNA, 20 bp, synthetic construct
  misc_feature 1..20: note = Description of Artificial Sequence: Synthetic oligonucleotide
  misc_feature 1..20: note = Target: ANGPTL4; (+) strand; PAM type: YTN; PAM sequence: CTA
  source 1..20: mol_type = other DNA
agttcctgctttattatagg

SEQ ID NO: 16772 - DNA, 20 bp, synthetic construct
  misc_feature 1..20: note = Description of Artificial Sequence: Synthetic oligonucleotide
  misc_feature 1..20: note = Target: ANGPTL4; (+) strand; PAM type: YTN; PAM sequence: TTC
  source 1..20: mol_type = other DNA
ctgctttattataggcaaag

SEQ ID NO: 16773 - DNA, 20 bp, synthetic construct
  misc_feature 1..20: note = Description of Artificial Sequence: Synthetic oligonucleotide
  misc_feature 1..20: note = Target: ANGPTL4; (+) strand; PAM type: YTN; PAM sequence: CTG
  source 1..20: mol_type = other DNA
ctttattataggcaaagctc

SEQ ID NO: 16774 - DNA, 20 bp, synthetic construct
  misc_feature 1..20: note = Description of Artificial Sequence: Synthetic oligonucleotide
  misc_feature 1..20: note = Target: ANGPTL4; (+) strand; PAM type: YTN; PAM sequence: CTT
  source 1..20: mol_type = other DNA
tattataggcaaagctcagg

SEQ ID NO: 16775 - DNA, 20 bp, synthetic construct
  misc_feature 1..20: note = Description of Artificial Sequence: Synthetic oligonucleotide
  misc_feature 1..20: note = Target: ANGPTL4; (+) strand; PAM type: YTN; PAM sequence: TTT
  source 1..20: mol_type = other DNA
attataggcaaagctcagga

SEQ ID NO: 16776 - DNA, 20 bp, synthetic construct
  misc_feature 1..20: note = Description of Artificial Sequence: Synthetic oligonucleotide
  misc_feature 1..20: note = Target: ANGPTL4; (+) strand; PAM type: YTN; PAM sequence: TTA
  source 1..20: mol_type = other DNA
ttataggcaaagctcaggac

SEQ ID NO: 16777 - DNA, 20 bp, synthetic construct
  misc_feature 1..20: note = Description of Artificial Sequence: Synthetic oligonucleotide
  misc_feature 1..20: note = Target: ANGPTL4; (+) strand; PAM type: YTN; PAM sequence: TTA
  source 1..20: mol_type = other DNA
taggcaaagctcaggacatt

SEQ ID NO: 16778 - DNA, 20 bp, synthetic construct
  misc_feature 1..20: note = Description of Artificial Sequence: Synthetic oligonucleotide
  misc_feature 1..20: note = Target: ANGPTL4; (+) strand; PAM type: YTN; PAM sequence: CTC
  source 1..20: mol_type = other DNA
aggacattaaagaccctggc

SEQ ID NO: 16779 - DNA, 20 bp, synthetic construct
  misc_feature 1..20: note = Description of Artificial Sequence: Synthetic oligonucleotide
  misc_feature 1..20: note = Target: ANGPTL4; (+) strand; PAM type: YTN; PAM sequence: TTA
  source 1..20: mol_type = other DNA
aagaccctggcggtagaggg

SEQ ID NO: 16780 - DNA, 20 bp, synthetic construct
  misc_feature 1..20: note = Description of Artificial Sequence: Synthetic oligonucleotide
  misc_feature 1..20: note = Target: ANGPTL4; (+) strand; PAM type: YTN; PAM sequence: CTG
  source 1..20: mol_type = other DNA
gcggtagagggtaggctatg

SEQ ID NO: 16781 - DNA, 20 bp, synthetic construct
  misc_feature 1..20: note = Description of Artificial Sequence: Synthetic oligonucleotide
  misc_feature 1..20: note = Target: ANGPTL4; (+) strand; PAM type: YTN; PAM sequence: CTA
  source 1..20: mol_type = other DNA
tgggggtgaggccctgatcc

SEQ ID NO: 16782 - DNA, 20 bp, synthetic construct
  misc_feature 1..20: note = Description of Artificial Sequence: Synthetic oligonucleotide
  misc_feature 1..20: note = Target: ANGPTL4; (+) strand; PAM type: YTN; PAM sequence: CTG
  source 1..20: mol_type = other DNA
atccaagtcctgccgctaag

SEQ ID NO: 16783 - DNA, 20 bp, synthetic construct
  misc_feature 1..20: note = Description of Artificial Sequence: Synthetic oligonucleotide
  misc_feature 1..20: note = Target: ANGPTL4; (+) strand; PAM type: YTN; PAM sequence: CTG
  source 1..20: mol_type = other DNA
ccgctaaggcactcataatt

SEQ ID NO: 16784 - DNA, 20 bp, synthetic construct
  misc_feature 1..20: note = Description of Artificial Sequence: Synthetic oligonucleotide
  misc_feature 1..20: note = Target: ANGPTL4; (+) strand; PAM type: YTN; PAM sequence: CTA
  source 1..20: mol_type = other DNA
aggcactcataatttcgggc

SEQ ID NO: 16785 - DNA, 20 bp, synthetic construct
  misc_feature 1..20: note = Description of Artificial Sequence: Synthetic oligonucleotide
  misc_feature 1..20: note = Target: ANGPTL4; (+) strand; PAM type: YTN; PAM sequence: CTC
  source 1..20: mol_type = other DNA
ataatttcgggctcagggga

SEQ ID NO: 16786 - DNA, 20 bp, synthetic construct
  misc_feature 1..20: note = Description of Artificial Sequence: Synthetic oligonucleotide
  misc_feature 1..20: note = Target: ANGPTL4; (+) strand; PAM type: YTN; PAM sequence: TTT
  source 1..20: mol_type = other DNA
cgggctcaggggagaaatgg

SEQ ID NO: 16787 - DNA, 20 bp, synthetic construct
  misc_feature 1..20: note = Description of Artificial Sequence: Synthetic oligonucleotide
  misc_feature 1..20: note = Target: ANGPTL4; (+) strand; PAM type: YTN; PAM sequence: TTC
  source 1..20: mol_type = other DNA
gggctcaggggagaaatgga

SEQ ID NO: 16788 - DNA, 20 bp, synthetic construct
  misc_feature 1..20: note = Description of Artificial Sequence: Synthetic oligonucleotide
  misc_feature 1..20: note = Target: ANGPTL4; (+) strand; PAM type: YTN; PAM sequence: CTC
  source 1..20: mol_type = other DNA
aggggagaaatggaagtcaa

SEQ ID NO: 16789 - DNA, 20 bp, synthetic construct
  misc_feature 1..20: note = Description of Artificial Sequence: Synthetic oligonucleotide
  misc_feature 1..20: note = Target: ANGPTL4; (+) strand; PAM type: YTN; PAM sequence: CTC
  source 1..20: mol_type = other DNA
ataaacacagctgcgatgac

SEQ ID NO: 16790 - DNA, 20 bp, synthetic construct
  misc_feature 1..20: note = Description of Artificial Sequence: Synthetic oligonucleotide
  misc_feature 1..20: note = Target: ANGPTL4; (+) strand; PAM type: YTN; PAM sequence: CTG
  source 1..20: mol_type = other DNA
cgatgacgaaccctttcacg

SEQ ID NO: 16791 - DNA, 20 bp, synthetic construct
  misc_feature 1..20: note = Description of Artificial Sequence: Synthetic oligonucleotide
  misc_feature 1..20: note = Target: ANGPTL4; (+) strand; PAM type: YTN; PAM sequence: CTT
  source 1..20: mol_type = other DNA
tcacgggaaggaacatgcga

SEQ ID NO: 16792 - DNA, 20 bp, synthetic construct
  misc_feature 1..20: note = Description of Artificial Sequence: Synthetic oligonucleotide
  misc_feature 1..20: note = Target: ANGPTL4; (+) strand; PAM type: YTN; PAM sequence: TTT
  source 1..20: mol_type = other DNA
cacgggaaggaacatgcgag

SEQ ID NO: 16793 - DNA, 20 bp, synthetic construct
  misc_feature 1..20: note = Description of Artificial Sequence: Synthetic oligonucleotide
  misc_feature 1..20: note = Target: ANGPTL4; (+) strand; PAM type: YTN; PAM sequence: TTC
  source 1..20: mol_type = other DNA
acgggaaggaacatgcgagc

SEQ ID NO: 16794 - DNA, 20 bp, synthetic construct
  misc_feature 1..20: note = Description of Artificial Sequence: Synthetic oligonucleotide
  misc_feature 1..20: note = Target: ANGPTL4; (+) strand; PAM type: YTN; PAM sequence: CTC
  source 1..20: mol_type = other DNA
tcctggtcttgggatggagg

SEQ ID NO: 16795 - DNA, 20 bp, synthetic construct
  misc_feature 1..20: note = Description of Artificial Sequence: Synthetic oligonucleotide
  misc_feature 1..20: note = Target: ANGPTL4; (+) strand; PAM type: YTN; PAM sequence: CTC
  source 1..20: mol_type = other DNA
ctggtcttgggatggaggtc

SEQ ID NO: 16796 - DNA, 20 bp, synthetic construct
  misc_feature 1..20: note = Description of Artificial Sequence: Synthetic oligonucleotide
  misc_feature 1..20: note = Target: ANGPTL4; (+) strand; PAM type: YTN; PAM sequence: CTG
  source 1..20: mol_type = other DNA
gtcttgggatggaggtcaca

SEQ ID NO: 16797 - DNA, 20 bp, synthetic construct
  misc_feature 1..20: note = Description of Artificial Sequence: Synthetic oligonucleotide
  misc_feature 1..20: note = Target: ANGPTL4; (+) strand; PAM type: YTN; PAM sequence: CTT
  source 1..20: mol_type = other DNA
gggatggaggtcacacgaag

SEQ ID NO: 16798 - DNA, 20 bp, synthetic construct
  misc_feature 1..20: note = Description of Artificial Sequence: Synthetic oligonucleotide
  misc_feature 1..20: note = Target: ANGPTL4; (+) strand; PAM type: YTN; PAM sequence: TTG
  source 1..20: mol_type = other DNA
ggatggaggtcacacgaagc

SEQ ID NO: 16799 - DNA, 20 bp, synthetic construct
  misc_feature 1..20: note = Description of Artificial Sequence: Synthetic oligonucleotide
  misc_feature 1..20: note = Target: ANGPTL4; (+) strand; PAM type: YTN; PAM sequence: CTC
  source 1..20: mol_type = other DNA
cgcaaggcaaggacttttgg

SEQ ID NO: 16800 - DNA, 20 bp, synthetic construct
  misc_feature 1..20: note = Description of Artificial Sequence: Synthetic oligonucleotide
  misc_feature 1..20: note = Target: ANGPTL4; (+) strand; PAM type: YTN; PAM sequence: CTT
  source 1..20: mol_type = other DNA
ttggtgagttccgggctccg

SEQ ID NO: 16801 - DNA, 20 bp, synthetic construct
  misc_feature 1..20: note = Description of Artificial Sequence: Synthetic oligonucleotide
  misc_feature 1..20: note = Target: ANGPTL4; (+) strand; PAM type: YTN; PAM sequence: TTT
  source 1..20: mol_type = other DNA
tggtgagttccgggctccgc

SEQ ID NO: 16802 - DNA, 20 bp, synthetic construct
  misc_feature 1..20: note = Description of Artificial Sequence: Synthetic oligonucleotide
  misc_feature 1..20: note = Target: ANGPTL4; (+) strand; PAM type: YTN; PAM sequence: TTT
  source 1..20: mol_type = other DNA
ggtgagttccgggctccgct

SEQ ID NO: 16803 - DNA, 20 bp, synthetic construct
  misc_feature 1..20: note = Description of Artificial Sequence: Synthetic oligonucleotide
  misc_feature 1..20: note = Target: ANGPTL4; (+) strand; PAM type: YTN; PAM sequence: TTG
  source 1..20: mol_type = other DNA
gtgagttccgggctccgctg

SEQ ID NO: 16804 - DNA, 20 bp, synthetic construct
  misc_feature 1..20: note = Description of Artificial Sequence: Synthetic oligonucleotide
  misc_feature 1..20: note = Target: ANGPTL4; (+) strand; PAM type: YTN; PAM sequence: TTC
  source 1..20: mol_type = other DNA
cgggctccgctgaactcagc

SEQ ID NO: 16805 - DNA, 20 bp, synthetic construct
  misc_feature 1..20: note = Description of Artificial Sequence: Synthetic oligonucleotide
  misc_feature 1..20: note = Target: ANGPTL4; (+) strand; PAM type: YTN; PAM sequence: CTC
  source 1..20: mol_type = other DNA
cgctgaactcagctcttttt

SEQ ID NO: 16806 - DNA, 20 bp, synthetic construct
  misc_feature 1..20: note = Description of Artificial Sequence: Synthetic oligonucleotide
  misc_feature 1..20: note = Target: ANGPTL4; (+) strand; PAM type: YTN; PAM sequence: CTG
  source 1..20: mol_type = other DNA
aactcagctctttttctttt

SEQ ID NO: 16807 - DNA, 20 bp, synthetic construct
  misc_feature 1..20: note = Description of Artificial Sequence: Synthetic oligonucleotide
  misc_feature 1..20: note = Target: ANGPTL4; (+) strand; PAM type: YTN; PAM sequence: CTC
  source 1..20: mol_type = other DNA
agctctttttcttttccttc

SEQ ID NO: 16808 - DNA, 20 bp, synthetic construct
  misc_feature 1..20: note = Description of Artificial Sequence: Synthetic oligonucleotide
  misc_feature 1..20: note = Target: ANGPTL4; (+) strand; PAM type: YTN; PAM sequence: CTC
  source 1..20: mol_type = other DNA
tttttcttttccttcctttc

SEQ ID NO: 16809 - DNA, 20 bp, synthetic construct
  misc_feature 1..20: note = Description of Artificial Sequence: Synthetic oligonucleotide
  misc_feature 1..20: note = Target: ANGPTL4; (+) strand; PAM type: YTN; PAM sequence: CTT
  source 1..20: mol_type = other DNA
tttcttttccttcctttctt

SEQ ID NO: 16810 - DNA, 20 bp, synthetic construct
  misc_feature 1..20: note = Description of Artificial Sequence: Synthetic oligonucleotide
  misc_feature 1..20: note = Target: ANGPTL4; (+) strand; PAM type: YTN; PAM sequence: TTT
  source 1..20: mol_type = other DNA
ttcttttccttcctttcttt

SEQ ID NO: 16811 - DNA, 20 bp, synthetic construct
  misc_feature 1..20: note = Description of Artificial Sequence: Synthetic oligonucleotide
  misc_feature 1..20: note = Target: ANGPTL4; (+) strand; PAM type: YTN; PAM sequence: TTT
  source 1..20: mol_type = other DNA
tcttttccttcctttctttc

SEQ ID NO: 16812 - DNA, 20 bp, synthetic construct
  misc_feature 1..20: note = Description of Artificial Sequence: Synthetic oligonucleotide
  misc_feature 1..20: note = Target: ANGPTL4; (+) strand; PAM type: YTN; PAM sequence: TTT
  source 1..20: mol_type = other DNA
cttttccttcctttctttcc

SEQ ID NO: 16813 - DNA, 20 bp, synthetic construct
  misc_feature 1..20: note = Description of Artificial Sequence: Synthetic oligonucleotide
  misc_feature 1..20: note = Target: ANGPTL4; (+) strand; PAM type: YTN; PAM sequence: TTC
  source 1..20: mol_type = other DNA
ttttccttcctttctttcct

SEQ ID NO: 16814 - DNA, 20 bp, synthetic construct
  misc_feature 1..20: note = Description of Artificial Sequence: Synthetic oligonucleotide
  misc_feature 1..20: note = Target: ANGPTL4; (+) strand; PAM type: YTN; PAM sequence: CTT
  source 1..20: mol_type = other DNA
ttccttcctttctttccttc

SEQ ID NO: 16815 - DNA, 20 bp, synthetic construct
  misc_feature 1..20: note = Description of Artificial Sequence: Synthetic oligonucleotide
  misc_feature 1..20: note = Target: ANGPTL4; (+) strand; PAM type: YTN; PAM sequence: TTT
  source 1..20: mol_type = other DNA
tccttcctttctttccttct

SEQ ID NO: 16816 - DNA, 20 bp, synthetic construct
  misc_feature 1..20: note = Description of Artificial Sequence: Synthetic oligonucleotide
  misc_feature 1..20: note = Target: ANGPTL4; (+) strand; PAM type: YTN; PAM sequence: TTT
  source 1..20: mol_type = other DNA
ccttcctttctttccttctt

SEQ ID NO: 16817 - DNA, 20 bp, synthetic construct
  misc_feature 1..20: note = Description of Artificial Sequence: Synthetic oligonucleotide
  misc_feature 1..20: note = Target: ANGPTL4; (+) strand; PAM type: YTN; PAM sequence: TTC
  source 1..20: mol_type = other DNA
cttcctttctttccttcttc

SEQ ID NO: 16818 - DNA, 20 bp, synthetic construct
  misc_feature 1..20: note = Description of Artificial Sequence: Synthetic oligonucleotide
  misc_feature 1..20: note = Target: ANGPTL4; (+) strand; PAM type: YTN; PAM sequence: CTT
  source 1..20: mol_type = other DNA
cctttctttccttcttcctt

SEQ ID NO: 16819 - DNA, 20 bp, synthetic construct
  misc_feature 1..20: note = Description of Artificial Sequence: Synthetic oligonucleotide
  misc_feature 1..20: note = Target: ANGPTL4; (+) strand; PAM type: YTN; PAM sequence: TTC
  source 1..20: mol_type = other DNA
ctttctttccttcttccttt

SEQ ID NO: 16820 - DNA, 20 bp, synthetic construct
  misc_feature 1..20: note = Description of Artificial Sequence: Synthetic oligonucleotide
  misc_feature 1..20: note = Target: ANGPTL4; (+) strand; PAM type: YTN; PAM sequence: CTT
  source 1..20: mol_type = other DNA
tctttccttcttcctttctt

SEQ ID NO: 16821 - DNA, 20 bp, synthetic construct
  misc_feature 1..20: note = Description of Artificial Sequence: Synthetic oligonucleotide
  misc_feature 1..20: note = Target: ANGPTL4; (+) strand; PAM type: YTN; PAM sequence: TTT
  source 1..20: mol_type = other DNA
ctttccttcttcctttcttt

SEQ ID NO: 16822 - DNA, 20 bp, synthetic construct
  misc_feature 1..20: note = Description of Artificial Sequence: Synthetic oligonucleotide
  misc_feature 1..20: note = Target: ANGPTL4; (+) strand; PAM type: YTN; PAM sequence: TTC
  source 1..20: mol_type = other DNA
tttccttcttcctttctttc

SEQ ID NO: 16823 - DNA, 20 bp, synthetic construct
  misc_feature 1..20: note = Description of Artificial Sequence: Synthetic oligonucleotide
  misc_feature 1..20: note = Target: ANGPTL4; (+) strand; PAM type: YTN; PAM sequence: CTT
  source 1..20: mol_type = other DNA
tccttcttcctttctttccc

SEQ ID NO: 16824 - DNA, 20 bp, synthetic construct
  misc_feature 1..20: note = Description of Artificial Sequence: Synthetic oligonucleotide
  misc_feature 1..20: note = Target: ANGPTL4; (+) strand; PAM type: YTN; PAM sequence: TTT
  source 1..20: mol_type = other DNA
ccttcttcctttctttccct

SEQ ID NO: 16825 - DNA, 20 bp, synthetic construct
  misc_feature 1..20: note = Description of Artificial Sequence: Synthetic oligonucleotide
  misc_feature 1..20: note = Target: ANGPTL4; (+) strand; PAM type: YTN; PAM sequence: TTC
  source 1..20: mol_type = other DNA
cttcttcctttctttccctc

SEQ ID NO: 16826 - DNA, 20 bp, synthetic construct
  misc_feature 1..20: note = Description of Artificial Sequence: Synthetic oligonucleotide
  misc_feature 1..20: note = Target: ANGPTL4; (+) strand; PAM type: YTN; PAM sequence: CTT
  source 1..20: mol_type = other DNA
cttcctttctttccctcctt

SEQ ID NO: 16827 - DNA, 20 bp, synthetic construct
  misc_feature 1..20: note = Description of Artificial Sequence: Synthetic oligonucleotide
  misc_feature 1..20: note = Target: ANGPTL4; (+) strand; PAM type: YTN; PAM sequence: TTC
  source 1..20: mol_type = other DNA
ttcctttctttccctccttc

SEQ ID NO: 16828 - DNA, 20 bp, synthetic construct
  misc_feature 1..20: note = Description of Artificial Sequence: Synthetic oligonucleotide
  misc_feature 1..20: note = Target: ANGPTL4; (+) strand; PAM type: YTN; PAM sequence: CTT
  source 1..20: mol_type = other DNA
cctttctttccctccttcct

SEQ ID NO: 16829 - DNA, 20 bp, synthetic construct
  misc_feature 1..20: note = Description of Artificial Sequence: Synthetic oligonucleotide
  misc_feature 1..20: note = Target: ANGPTL4; (+) strand; PAM type: YTN; PAM sequence: TTC
  source 1..20: mol_type = other DNA
ctttctttccctccttcctt

SEQ ID NO: 16830 - DNA, 20 bp, synthetic construct
  misc_feature 1..20: note = Description of Artificial Sequence: Synthetic oligonucleotide
  misc_feature 1..20: note = Target: ANGPTL4; (+) strand; PAM type: YTN; PAM sequence: CTT
  source 1..20: mol_type = other DNA
tctttccctccttccttcct

SEQ ID NO: 16831 - DNA, 20 bp, synthetic construct
  misc_feature 1..20: note = Description of Artificial Sequence: Synthetic oligonucleotide
  misc_feature 1..20: note = Target: ANGPTL4; (+) strand; PAM type: YTN; PAM sequence: TTT
  source 1..20: mol_type = other DNA
ctttccctccttccttcctt

SEQ ID NO: 16832 - DNA, 20 bp, synthetic construct
  misc_feature 1..20: note = Description of Artificial Sequence: Synthetic oligonucleotide
  misc_feature 1..20: note = Target: ANGPTL4; (+) strand; PAM type: YTN; PAM sequence: TTC
  source 1..20: mol_type = other DNA
tttccctccttccttccttc

SEQ ID NO: 16833 - DNA, 20 bp, synthetic construct
  misc_feature 1..20: note = Description of Artificial Sequence: Synthetic oligonucleotide
  misc_feature 1..20: note = Target: ANGPTL4; (+) strand; PAM type: YTN; PAM sequence: CTT
  source 1..20: mol_type = other DNA
tccctccttccttccttcct

SEQ ID NO: 16834 - DNA, 20 bp, synthetic construct
  misc_feature 1..20: note = Description of Artificial Sequence: Synthetic oligonucleotide
  misc_feature 1..20: note = Target: ANGPTL4; (+) strand; PAM type: YTN; PAM sequence: TTT
  source 1..20: mol_type = other DNA
ccctccttccttccttcctc

SEQ ID NO: 16835 - DNA, 20 bp, synthetic construct
  misc_feature 1..20: note = Description of Artificial Sequence: Synthetic oligonucleotide
  misc_feature 1..20: note = Target: ANGPTL4; (+) strand; PAM type: YTN; PAM sequence: TTC
  source 1..20: mol_type = other DNA
cctccttccttccttcctct

SEQ ID NO: 16836 - DNA, 20 bp, synthetic construct
  misc_feature 1..20: note = Description of Artificial Sequence: Synthetic oligonucleotide
  misc_feature 1..20: note = Target: ANGPTL4; (+) strand; PAM type: YTN; PAM sequence: CTC
  source 1..20: mol_type = other DNA
cttccttccttcctctttct

SEQ ID NO: 16837 - DNA, 20 bp, synthetic construct
  misc_feature 1..20: note = Description of Artificial Sequence: Synthetic oligonucleotide
  misc_feature 1..20: note = Target: ANGPTL4; (+) strand; PAM type: YTN; PAM sequence: CTT
  source 1..20: mol_type = other DNA
ccttccttcctctttctctc

SEQ ID NO: 16838 - DNA, 20 bp, synthetic construct
  misc_feature 1..20: note = Description of Artificial Sequence: Synthetic oligonucleotide
  misc_feature 1..20: note = Target: ANGPTL4; (+) strand; PAM type: YTN; PAM sequence: TTC
  source 1..20: mol_type = other DNA
cttccttcctctttctctct

SEQ ID NO: 16839 - DNA, 20 bp, synthetic construct
  misc_feature 1..20: note = Description of Artificial Sequence: Synthetic oligonucleotide
  misc_feature 1..20: note = Target: ANGPTL4; (+) strand; PAM type: YTN; PAM sequence: CTT
  source 1..20: mol_type = other DNA
ccttcctctttctctctttc

SEQ ID NO: 16840 - DNA, 20 bp, synthetic construct
  misc_feature 1..20: note = Description of Artificial Sequence: Synthetic oligonucleotide
  misc_feature 1..20: note = Target: ANGPTL4; (+) strand; PAM type: YTN; PAM sequence: TTC
  source 1..20: mol_type = other DNA
cttcctctttctctctttcc

SEQ ID NO: 16841 - DNA, 20 bp, synthetic construct
  misc_feature 1..20: note = Description of Artificial Sequence: Synthetic oligonucleotide
  misc_feature 1..20: note = Target: ANGPTL4; (+) strand; PAM type: YTN; PAM sequence: CTT
  source 1..20: mol_type = other DNA
cctctttctctctttccttt

SEQ ID NO: 16842 - DNA, 20 bp, synthetic construct
  misc_feature 1..20: note = Description of Artificial Sequence: Synthetic oligonucleotide
  misc_feature 1..20: note = Target: ANGPTL4; (+) strand; PAM type: YTN; PAM sequence: TTC
  source 1..20: mol_type = other DNA
ctctttctctctttcctttc

SEQ ID NO: 16843 - DNA, 20 bp, synthetic construct
  misc_feature 1..20: note = Description of Artificial Sequence: Synthetic oligonucleotide
  misc_feature 1..20: note = Target: ANGPTL4; (+) strand; PAM type: YTN; PAM sequence: CTC
  source 1..20: mol_type = other DNA
tttctctctttcctttctct

SEQ ID NO: 16844 - DNA, 20 bp, synthetic construct
  misc_feature 1..20: note = Description of Artificial Sequence: Synthetic oligonucleotide
  misc_feature 1..20: note = Target: ANGPTL4; (+) strand; PAM type: YTN; PAM sequence: CTT
  source 1..20: mol_type = other DNA
tctctctttcctttctctct

SEQ ID NO: 16845 - DNA, 20 bp, synthetic construct
  misc_feature 1..20: note = Description of Artificial Sequence: Synthetic oligonucleotide
  misc_feature 1..20: note = Target: ANGPTL4; (+) strand; PAM type: YTN; PAM sequence: TTT
  source 1..20: mol_type = other DNA
ctctctttcctttctctctc

SEQ ID NO: 16846 - DNA, 20 bp, synthetic construct
  misc_feature 1..20: note = Description of Artificial Sequence: Synthetic oligonucleotide
  misc_feature 1..20: note = Target: ANGPTL4; (+) strand; PAM type: YTN; PAM sequence: TTC
  source 1..20: mol_type = other DNA
tctctttcctttctctctct

SEQ ID NO: 16847 - DNA, 20 bp, synthetic construct
  misc_feature 1..20: note = Description of Artificial Sequence: Synthetic oligonucleotide
  misc_feature 1..20: note = Target: ANGPTL4; (+) strand; PAM type: YTN; PAM sequence: CTC
  source 1..20: mol_type = other DNA
tctttcctttctctctctct

SEQ ID NO: 16848 - DNA, 20 bp, synthetic construct
  misc_feature 1..20: note = Description of Artificial Sequence: Synthetic oligonucleotide
  misc_feature 1..20: note = Target: ANGPTL4; (+) strand; PAM type: YTN; PAM sequence: CTC
  source 1..20: mol_type = other DNA
tttcctttctctctctcttt

SEQ ID NO: 16849 - DNA, 20 bp, synthetic construct
  misc_feature 1..20: note = Description of Artificial Sequence: Synthetic oligonucleotide
  misc_feature 1..20: note = Target: ANGPTL4; (+) strand; PAM type: YTN; PAM sequence: CTT
  source 1..20: mol_type = other DNA
tcctttctctctctcttttc

SEQ ID NO: 16850 - DNA, 20 bp, synthetic construct
  misc_feature 1..20: note = Description of Artificial Sequence: Synthetic oligonucleotide
  misc_feature 1..20: note = Target: ANGPTL4; (+) strand; PAM type: YTN; PAM sequence: TTT
  source 1..20: mol_type = other DNA
cctttctctctctcttttct

SEQ ID NO: 16851 - DNA, 20 bp, synthetic construct
  misc_feature 1..20: note = Description of Artificial Sequence: Synthetic oligonucleotide
  misc_feature 1..20: note = Target: ANGPTL4; (+) strand; PAM type: YTN; PAM sequence: TTC
  source 1..20: mol_type = other DNA
ctttctctctctcttttctc

SEQ ID NO: 16852 - DNA, 20 bp, synthetic construct
  misc_feature 1..20: note = Description of Artificial Sequence: Synthetic oligonucleotide
  misc_feature 1..20: note = Target: ANGPTL4; (+) strand; PAM type: YTN; PAM sequence: CTT
  source 1..20: mol_type = other DNA
tctctctctcttttctctct

SEQ ID NO: 16853 - DNA, 20 bp, synthetic construct
  misc_feature 1..20: note = Description of Artificial Sequence: Synthetic oligonucleotide
  misc_feature 1..20: note = Target: ANGPTL4; (+) strand; PAM type: YTN; PAM sequence: TTT
  source 1..20: mol_type = other DNA
ctctctctcttttctctctc

SEQ ID NO: 16854 - DNA, 20 bp, synthetic construct
  misc_feature 1..20: note = Description of Artificial Sequence: Synthetic oligonucleotide
  misc_feature 1..20: note = Target: ANGPTL4; (+) strand; PAM type: YTN; PAM sequence: TTC
  source 1..20: mol_type = other DNA
tctctctcttttctctctct

SEQ ID NO: 16855 - DNA, 20 bp, synthetic construct
  misc_feature 1..20: note = Description of Artificial Sequence: Synthetic oligonucleotide
  misc_feature 1..20: note = Target: ANGPTL4; (+) strand; PAM type: YTN; PAM sequence: CTC
  source 1..20: mol_type = other DNA
tctctcttttctctctctct

SEQ ID NO: 16856 - DNA, 20 bp, synthetic construct
  misc_feature 1..20: note = Description of Artificial Sequence: Synthetic oligonucleotide
  misc_feature 1..20: note = Target: ANGPTL4; (+) strand; PAM type: YTN; PAM sequence: CTC
  source 1..20: mol_type = other DNA
tctcttttctctctctctct

SEQ ID NO: 16857 - DNA, 20 bp, synthetic construct
  misc_feature 1..20: note = Description of Artificial Sequence: Synthetic oligonucleotide
  misc_feature 1..20: note = Target: ANGPTL4; (+) strand; PAM type: YTN; PAM sequence: CTC
  source 1..20: mol_type = other DNA
tcttttctctctctctctcc

SEQ ID NO: 16858 - DNA, 20 bp, synthetic construct
  misc_feature 1..20: note = Description of Artificial Sequence: Synthetic oligonucleotide
  misc_feature 1..20: note = Target: ANGPTL4; (+) strand; PAM type: YTN; PAM sequence: CTC
  source 1..20: mol_type = other DNA
ttttctctctctctctcctt

SEQ ID NO: 16859 - DNA, 20 bp, synthetic construct
  misc_feature 1..20: note = Description of Artificial Sequence: Synthetic oligonucleotide
  misc_feature 1..20: note = Target: ANGPTL4; (+) strand; PAM type: YTN; PAM sequence: CTT
  source 1..20: mol_type = other DNA
ttctctctctctctccttct

SEQ ID NO: 16860 - DNA, 20 bp, synthetic construct
  misc_feature 1..20: note = Description of Artificial Sequence: Synthetic oligonucleotide
  misc_feature 1..20: note = Target: ANGPTL4; (+) strand; PAM type: YTN; PAM sequence: TTT
  source 1..20: mol_type = other DNA
tctctctctctctccttctt

SEQ ID NO: 16861 - DNA, 20 bp, synthetic construct
  misc_feature 1..20: note = Description of Artificial Sequence: Synthetic oligonucleotide
  misc_feature 1..20: note = Target: ANGPTL4; (+) strand; PAM type: YTN; PAM sequence: TTT
  source 1..20: mol_type = other DNA
ctctctctctctccttcttc

SEQ ID NO: 16862 - DNA, 20 bp, synthetic construct
  misc_feature 1..20: note = Description of Artificial Sequence: Synthetic oligonucleotide
  misc_feature 1..20: note = Target: ANGPTL4; (+) strand; PAM type: YTN; PAM sequence: TTC
  source 1..20: mol_type = other DNA
tctctctctctccttcttcc

SEQ ID NO: 16863 - DNA, 20 bp, synthetic construct
  misc_feature 1..20: note = Description of Artificial Sequence: Synthetic oligonucleotide
  misc_feature 1..20: note = Target: ANGPTL4; (+) strand; PAM type: YTN; PAM sequence: CTC
  source 1..20: mol_type = other DNA
tctctctctccttcttccct

SEQ ID NO: 16864 - DNA, 20 bp, synthetic construct
  misc_feature 1..20: note = Description of Artificial Sequence: Synthetic oligonucleotide
  misc_feature 1..20: note = Target: ANGPTL4; (+) strand; PAM type: YTN; PAM sequence: CTC
  source 1..20: mol_type = other DNA
tctctctccttcttccctcc

SEQ ID NO: 16865 - DNA, 20 bp, synthetic construct
  misc_feature 1..20: note = Description of Artificial Sequence: Synthetic oligonucleotide
  misc_feature 1..20: note = Target: ANGPTL4; (+) strand; PAM type: YTN; PAM sequence: CTC
  source 1..20: mol_type = other DNA
tctctccttcttccctccct

SEQ ID NO: 16866 - DNA, 20 bp, synthetic construct
  misc_feature 1..20: note = Description of Artificial Sequence: Synthetic oligonucleotide
  misc_feature 1..20: note = Target: ANGPTL4; (+) strand; PAM type: YTN; PAM sequence: CTC
  source 1..20: mol_type = other DNA
tctccttcttccctccctcc

SEQ ID NO: 16867 - DNA, 20 bp, synthetic construct
  misc_feature 1..20: note = Description of Artificial Sequence: Synthetic oligonucleotide
  misc_feature 1..20: note = Target: ANGPTL4; (+) strand; PAM type: YTN; PAM sequence: CTC
  source 1..20: mol_type = other DNA
tccttcttccctccctccct

SEQ ID NO: 16868 - DNA, 20 bp, synthetic construct
  misc_feature 1..20: note = Description of Artificial Sequence: Synthetic oligonucleotide
  misc_feature 1..20: note = Target: ANGPTL4; (+) strand; PAM type: YTN; PAM sequence: CTC
  source 1..20: mol_type = other DNA
cttcttccctccctccctac

SEQ ID NO: 16869 - DNA, 20 bp, synthetic construct
  misc_feature 1..20: note = Description of Artificial Sequence: Synthetic oligonucleotide
  misc_feature 1..20: note = Target: ANGPTL4; (+) strand; PAM type: YTN; PAM sequence: CTT
  source 1..20: mol_type = other DNA
cttccctccctccctacctc

SEQ ID NO: 16870 - DNA, 20 bp, synthetic construct
  misc_feature 1..20: note = Description of Artificial Sequence: Synthetic oligonucleotide
  misc_feature 1..20: note = Target: ANGPTL4; (+) strand; PAM type: YTN; PAM sequence: TTC
  source 1..20: mol_type = other DNA
ttccctccctccctacctct

SEQ ID NO: 16871 - DNA, 20 bp, synthetic construct
  misc_feature 1..20: note = Description of Artificial Sequence: Synthetic oligonucleotide
  misc_feature 1..20: note = Target: ANGPTL4; (+) strand; PAM type: YTN; PAM sequence: CTT
  source 1..20: mol_type = other DNA
ccctccctccctacctctct

SEQ ID NO: 16872 - DNA, 20 bp, synthetic construct
  misc_feature 1..20: note = Description of Artificial Sequence: Synthetic oligonucleotide
  misc_feature 1..20: note = Target: ANGPTL4; (+) strand; PAM type: YTN; PAM sequence: TTC
  source 1..20: mol_type = other DNA
cctccctccctacctctctc

SEQ ID NO: 16873 - DNA, 20 bp, synthetic construct
  misc_feature 1..20: note = Description of Artificial Sequence: Synthetic oligonucleotide
  misc_feature 1..20: note = Target: ANGPTL4; (+) strand; PAM type: YTN; PAM sequence: CTC
  source 1..20: mol_type = other DNA
cctccctacctctctctctt

SEQ ID NO: 16874 - DNA, 20 bp, synthetic construct
  misc_feature 1..20: note = Description of Artificial Sequence: Synthetic oligonucleotide
  misc_feature 1..20: note = Target: ANGPTL4; (+) strand; PAM type: YTN; PAM sequence: CTC
  source 1..20: mol_type = other DNA
cctacctctctctcttttct

SEQ ID NO: 16875 - DNA, 20 bp, synthetic construct
  misc_feature 1..20: note = Description of Artificial Sequence: Synthetic oligonucleotide
  misc_feature 1..20: note = Target: ANGPTL4; (+) strand; PAM type: YTN; PAM sequence: CTA
  source 1..20: mol_type = other DNA
cctctctctcttttcttttt

SEQ ID NO: 16876 - DNA, 20 bp, synthetic construct
  misc_feature 1..20: note = Description of Artificial Sequence: Synthetic oligonucleotide
  misc_feature 1..20: note = Target: ANGPTL4; (+) strand; PAM type: YTN; PAM sequence: CTC
  source 1..20: mol_type = other DNA
tctctcttttctttttccgt

SEQ ID NO: 16877 - DNA, 20 bp, synthetic construct
  misc_feature 1..20: note = Description of Artificial Sequence: Synthetic oligonucleotide
  misc_feature 1..20: note = Target: ANGPTL4; (+) strand; PAM type: YTN; PAM sequence: CTC
  source 1..20: mol_type = other DNA
tctcttttctttttccgtcc

SEQ ID NO: 16878 - DNA, 20 bp, synthetic construct
  misc_feature 1..20: note = Description of Artificial Sequence: Synthetic oligonucleotide
  misc_feature 1..20: note = Target: ANGPTL4; (+) strand; PAM type: YTN; PAM sequence: CTC
  source 1..20: mol_type = other DNA
tcttttctttttccgtcctt

SEQ ID NO: 16879 - DNA, 20 bp, synthetic construct
  misc_feature 1..20: note = Description of Artificial Sequence: Synthetic oligonucleotide
  misc_feature 1..20: note = Target: ANGPTL4; (+) strand; PAM type: YTN; PAM sequence: CTC
  source 1..20: mol_type = other DNA
ttttctttttccgtccttcc

SEQ ID NO: 16880 - DNA, 20 bp, synthetic construct
  misc_feature 1..20: note = Description of Artificial Sequence: Synthetic oligonucleotide
  misc_feature 1..20: note = Target: ANGPTL4; (+) strand; PAM type: YTN; PAM sequence: CTT
  source 1..20: mol_type = other DNA
ttctttttccgtccttcctt

SEQ ID NO: 16881 - DNA, 20 bp, synthetic construct
  misc_feature 1..20: note = Description of Artificial Sequence: Synthetic oligonucleotide
  misc_feature 1..20: note = Target: ANGPTL4; (+) strand; PAM type: YTN; PAM sequence: TTT
  source 1..20: mol_type = other DNA
tctttttccgtccttccttc

SEQ ID NO: 16882 - DNA, 20 bp, synthetic construct
  misc_feature 1..20: note = Description of Artificial Sequence: Synthetic oligonucleotide
  misc_feature 1..20: note = Target: ANGPTL4; (+) strand; PAM type: YTN; PAM sequence: TTT
  source 1..20: mol_type = other DNA
ctttttccgtccttccttcc

SEQ ID NO: 16883 - DNA, 20 bp, synthetic construct
  misc_feature 1..20: note = Description of Artificial Sequence: Synthetic oligonucleotide
  misc_feature 1..20: note = Target: ANGPTL4; (+) strand; PAM type: YTN; PAM sequence: TTC
  source 1..20: mol_type = other DNA
tttttccgtccttccttcct

SEQ ID NO: 16884 - DNA, 20 bp, synthetic construct
  misc_feature 1..20: note = Description of Artificial Sequence: Synthetic oligonucleotide
  misc_feature 1..20: note = Target: ANGPTL4; (+) strand; PAM type: YTN; PAM sequence: CTT
  source 1..20: mol_type = other DNA
tttccgtccttccttccttc

SEQ ID NO: 16885 - DNA, 20 bp, synthetic construct
  misc_feature 1..20: note = Description of Artificial Sequence: Synthetic oligonucleotide
  misc_feature 1..20: note = Target: ANGPTL4; (+) strand; PAM type: YTN; PAM sequence: TTT
  source 1..20: mol_type = other DNA
ttccgtccttccttccttct

SEQ ID NO: 16886 - DNA, 20 bp, synthetic construct
  misc_feature 1..20: note = Description of Artificial Sequence: Synthetic oligonucleotide
  misc_feature 1..20: note = Target: ANGPTL4; (+) strand; PAM type: YTN; PAM sequence: TTT
  source 1..20: mol_type = other DNA
tccgtccttccttccttctt

SEQ ID NO: 16887 - DNA, 20 bp, synthetic construct
  misc_feature 1..20: note = Description of Artificial Sequence: Synthetic oligonucleotide
  misc_feature 1..20: note = Target: ANGPTL4; (+) strand; PAM type: YTN; PAM sequence: TTT
  source 1..20: mol_type = other DNA
ccgtccttccttccttcttt

SEQ ID NO: 16888 - DNA, 20 bp, synthetic construct
  misc_feature 1..20: note = Description of Artificial Sequence: Synthetic oligonucleotide
  misc_feature 1..20: note = Target: ANGPTL4; (+) strand; PAM type: YTN; PAM sequence: TTC
  source 1..20: mol_type = other DNA
cgtccttccttccttctttc

SEQ ID NO: 16889 - DNA, 20 bp, synthetic construct
  misc_feature 1..20: note = Description of Artificial Sequence: Synthetic oligonucleotide
  misc_feature 1..20: note = Target: ANGPTL4; (+) strand; PAM type: YTN; PAM sequence: CTT
  source 1..20: mol_type = other DNA
ccttccttctttccttcttt

SEQ ID NO: 16890 - DNA, 20 bp, synthetic construct
  misc_feature 1..20: note = Description of Artificial Sequence: Synthetic oligonucleotide
  misc_feature 1..20: note = Target: ANGPTL4; (+) strand; PAM type: YTN; PAM sequence: TTC
  source 1..20: mol_type = other DNA
cttccttctttccttctttc

SEQ ID NO: 16891 - DNA, 20 bp, synthetic construct
  misc_feature 1..20: note = Description of Artificial Sequence: Synthetic oligonucleotide
  misc_feature 1..20: note = Target: ANGPTL4; (+) strand; PAM type: YTN; PAM sequence: CTT
  source 1..20: mol_type = other DNA
ccttctttccttctttctct

SEQ ID NO: 16892 - DNA, 20 bp, synthetic construct
  misc_feature 1..20: note = Description of Artificial Sequence: Synthetic oligonucleotide
  misc_feature 1..20: note = Target: ANGPTL4; (+) strand; PAM type: YTN; PAM sequence: TTC
  source 1..20: mol_type = other DNA
cttctttccttctttctctc

SEQ ID NO: 16893 - DNA, 20 bp, synthetic construct
  misc_feature 1..20: note = Description of Artificial Sequence: Synthetic oligonucleotide
  misc_feature 1..20: note = Target: ANGPTL4; (+) strand; PAM type: YTN; PAM sequence: CTT
  source 1..20: mol_type = other DNA
ctttccttctttctctctct

SEQ ID NO: 16894 - DNA, 20 bp, synthetic construct
  misc_feature 1..20: note = Description of Artificial Sequence: Synthetic oligonucleotide
  misc_feature 1..20: note = Target: ANGPTL4; (+) strand; PAM type: YTN; PAM sequence: TTC
  source 1..20: mol_type = other DNA
tttccttctttctctctctt

SEQ ID NO: 16895 - DNA, 20 bp, synthetic construct
  misc_feature 1..20: note = Description of Artificial Sequence: Synthetic oligonucleotide
  misc_feature 1..20: note = Target: ANGPTL4; (+) strand; PAM type: YTN; PAM sequence: CTT
  source 1..20: mol_type = other DNA
tccttctttctctctctttt

SEQ ID NO: 16896 - DNA, 20 bp, synthetic construct
  misc_feature 1..20: note = Description of Artificial Sequence: Synthetic oligonucleotide
  misc_feature 1..20: note = Target: ANGPTL4; (+) strand; PAM type: YTN; PAM sequence: TTT
  source 1..20: mol_type = other DNA
ccttctttctctctcttttc

SEQ ID NO: 16897 - DNA, 20 bp, synthetic construct
  misc_feature 1..20: note = Description of Artificial Sequence: Synthetic oligonucleotide
  misc_feature 1..20: note = Target: ANGPTL4; (+) strand; PAM type: YTN; PAM sequence: TTC
  source 1..20: mol_type = other DNA
cttctttctctctcttttct

SEQ ID NO: 16898 - DNA, 20 bp, synthetic construct
  misc_feature 1..20: note = Description of Artificial Sequence: Synthetic oligonucleotide
  misc_feature 1..20: note = Target: ANGPTL4; (+) strand; PAM type: YTN; PAM sequence: CTT
  source 1..20: mol_type = other DNA
ctttctctctcttttctttc

SEQ ID NO: 16899 - DNA, 20 bp, synthetic construct
  misc_feature 1..20: note = Description of Artificial Sequence: Synthetic oligonucleotide
  misc_feature 1..20: note = Target: ANGPTL4; (+) strand; PAM type: YTN; PAM sequence: TTC
  source 1..20: mol_type = other DNA
tttctctctcttttctttct

SEQ ID NO: 16900 - DNA, 20 bp, synthetic construct
  misc_feature 1..20: note = Description of Artificial Sequence: Synthetic oligonucleotide
  misc_feature 1..20: note = Target: ANGPTL4; (+) strand; PAM type: YTN; PAM sequence: CTT
  source 1..20: mol_type = other DNA
tctctctcttttctttcttt

SEQ ID NO: 16901 - DNA, 20 bp, synthetic construct
  misc_feature 1..20: note = Description of Artificial Sequence: Synthetic oligonucleotide
  misc_feature 1..20: note = Target: ANGPTL4; (+) strand; PAM type: YTN; PAM sequence: TTT
  source 1..20: mol_type = other DNA
ctctctcttttctttctttt

SEQ ID NO: 16902 - DNA, 20 bp, synthetic construct
  misc_feature 1..20: note = Description of Artificial Sequence: Synthetic oligonucleotide
  misc_feature 1..20: note = Target: ANGPTL4; (+) strand; PAM type: YTN; PAM sequence: TTC
  source 1..20: mol_type = other DNA
tctctcttttctttcttttc

SEQ ID NO: 16903 - DNA, 20 bp, synthetic construct
  misc_feature 1..20: note = Description of Artificial Sequence: Synthetic oligonucleotide
  misc_feature 1..20: note = Target: ANGPTL4; (+) strand; PAM type: YTN; PAM sequence: CTC
  source 1..20: mol_type = other DNA
tctcttttctttcttttctt

SEQ ID NO: 16904 - DNA, 20 bp, synthetic construct
  misc_feature 1..20: note = Description of Artificial Sequence: Synthetic oligonucleotide
  misc_feature 1..20: note = Target: ANGPTL4; (+) strand; PAM type: YTN; PAM sequence: CTC
  source 1..20: mol_type = other DNA
tcttttctttcttttctttt

SEQ ID NO: 16905 - DNA, 20 bp, synthetic construct
  misc_feature 1..20: note = Description of Artificial Sequence: Synthetic oligonucleotide
  misc_feature 1..20: note = Target: ANGPTL4; (+) strand; PAM type: YTN; PAM sequence: CTC
  source 1..20: mol_type = other DNA
ttttctttcttttcttttct

SEQ ID NO: 16906 - DNA, 20 bp, synthetic construct
  misc_feature 1..20: note = Description of Artificial Sequence: Synthetic oligonucleotide
  misc_feature 1..20: note = Target: ANGPTL4; (+) strand; PAM type: YTN; PAM sequence: CTT
  source 1..20: mol_type = other DNA
ttctttcttttcttttcttt

SEQ ID NO: 16907 - DNA, 20 bp, synthetic construct
  misc_feature 1..20: note = Description of Artificial Sequence: Synthetic oligonucleotide
  misc_feature 1..20: note = Target: ANGPTL4; (+) strand; PAM type: YTN; PAM sequence: TTT
  source 1..20: mol_type = other DNA
tctttcttttcttttctttt

SEQ ID NO: 16908 - DNA, 20 bp, synthetic construct
  misc_feature 1..20: note = Description of Artificial Sequence: Synthetic oligonucleotide
  misc_feature 1..20: note = Target: ANGPTL4; (+) strand; PAM type: YTN; PAM sequence: TTT
  source 1..20: mol_type = other DNA
ctttcttttcttttcttttc

SEQ ID NO: 16909 - DNA, 20 bp, synthetic construct
  misc_feature 1..20: note = Description of Artificial Sequence: Synthetic oligonucleotide
  misc_feature 1..20: note = Target: ANGPTL4; (+) strand; PAM type: YTN; PAM sequence: TTC
  source 1..20: mol_type = other DNA
tttcttttcttttcttttct

SEQ ID NO: 16910 - DNA, 20 bp, synthetic construct
  misc_feature 1..20: note = Description of Artificial Sequence: Synthetic oligonucleotide
  misc_feature 1..20: note = Target: ANGPTL4; (+) strand; PAM type: YTN; PAM sequence: CTT
  source 1..20: mol_type = other DNA
tcttttcttttcttttctct

SEQ ID NO: 16911 - DNA, 20 bp, synthetic construct
  misc_feature 1..20: note = Description of Artificial Sequence: Synthetic oligonucleotide
  misc_feature 1..20: note = Target: ANGPTL4; (+) strand; PAM type: YTN; PAM sequence: TTT
  source 1..20: mol_type = other DNA
cttttcttttcttttctctt

SEQ ID NO: 16912 - DNA, 20 bp, synthetic construct
  misc_feature 1..20: note = Description of Artificial Sequence: Synthetic oligonucleotide
  misc_feature 1..20: note = Target: ANGPTL4; (+) strand; PAM type: YTN; PAM sequence: TTC
  source 1..20: mol_type = other DNA
ttttcttttcttttctcttc

SEQ ID NO: 16913 - DNA, 20 bp, synthetic construct
  misc_feature 1..20: note = Description of Artificial Sequence: Synthetic oligonucleotide
  misc_feature 1..20: note = Target: ANGPTL4; (+) strand; PAM type: YTN; PAM sequence: CTT
  source 1..20: mol_type = other DNA
ttcttttcttttctcttctt

SEQ ID NO: 16914 - DNA, 20 bp, synthetic construct
  misc_feature 1..20: note = Description of Artificial Sequence: Synthetic oligonucleotide
  misc_feature 1..20: note = Target: ANGPTL4; (+) strand; PAM type: YTN; PAM sequence: TTT
  source 1..20: mol_type = other DNA
tcttttcttttctcttcttt

SEQ ID NO: 16915 - DNA, 20 bp, synthetic construct
  misc_feature 1..20: note = Description of Artificial Sequence: Synthetic oligonucleotide
  misc_feature 1..20: note = Target: ANGPTL4; (+) strand; PAM type: YTN; PAM sequence: TTT
  source 1..20: mol_type = other DNA
cttttcttttctcttctttc

SEQ ID NO: 16916 - DNA, 20 bp, synthetic construct
  misc_feature 1..20: note = Description of Artificial Sequence: Synthetic oligonucleotide
  misc_feature 1..20: note = Target: ANGPTL4; (+) strand; PAM type: YTN; PAM sequence: TTC
  source 1..20: mol_type = other DNA
ttttcttttctcttctttca

SEQ ID NO: 16917 - DNA, 20 bp, synthetic construct
  misc_feature 1..20: note = Description of Artificial Sequence: Synthetic oligonucleotide
  misc_feature 1..20: note = Target: ANGPTL4; (+) strand; PAM type: YTN; PAM sequence: CTT
  source 1..20: mol_type = other DNA
ttcttttctcttctttcatt

SEQ ID NO: 16918 - DNA, 20 bp, synthetic construct
  misc_feature 1..20: note = Description of Artificial Sequence: Synthetic oligonucleotide
  misc_feature 1..20: note = Target: ANGPTL4; (+) strand; PAM type: YTN; PAM sequence: TTT
  source 1..20: mol_type = other DNA
tcttttctcttctttcattt

SEQ ID NO: 16919 - DNA, 20 bp, synthetic construct
  misc_feature 1..20: note = Description of Artificial Sequence: Synthetic oligonucleotide
  misc_feature 1..20: note = Target: ANGPTL4; (+) strand; PAM type: YTN; PAM sequence: TTT
  source 1..20: mol_type = other DNA
cttttctcttctttcatttt

SEQ ID NO: 16920 - DNA, 20 bp, synthetic construct
  misc_feature 1..20: note = Description of Artificial Sequence: Synthetic oligonucleotide
  misc_feature 1..20: note = Target: ANGPTL4; (+) strand; PAM type: YTN; PAM sequence: TTC
  source 1..20: mol_type = other DNA
ttttctcttctttcattttg

SEQ ID NO: 16921 - DNA, 20 bp, synthetic construct
  misc_feature 1..20: note = Description of Artificial Sequence: Synthetic oligonucleotide
  misc_feature 1..20: note = Target: ANGPTL4; (+) strand; PAM type: YTN; PAM sequence: CTT
  source 1..20: mol_type = other DNA
ttctcttctttcattttgag

SEQ ID NO: 16922 - DNA, 20 bp, synthetic construct
  misc_feature 1..20: note = Description of Artificial Sequence: Synthetic oligonucleotide
  misc_feature 1..20: note = Target: ANGPTL4; (+) strand; PAM type: YTN; PAM sequence: TTT
  source 1..20: mol_type = other DNA
tctcttctttcattttgaga

SEQ ID NO: 16923 - DNA, 20 bp, synthetic construct
  misc_feature 1..20: note = Description of Artificial Sequence: Synthetic oligonucleotide
  misc_feature 1..20: note = Target: ANGPTL4; (+) strand; PAM type: YTN; PAM sequence: TTT
  source 1..20: mol_type = other DNA
ctcttctttcattttgagac

SEQ ID NO: 16924 - DNA, 20 bp, synthetic construct
  misc_feature 1..20: note = Description of Artificial Sequence: Synthetic oligonucleotide
  misc_feature 1..20: note = Target: ANGPTL4; (+) strand; PAM type: YTN; PAM sequence: TTC
  source 1..20: mol_type = other DNA
tcttctttcattttgagacg

SEQ ID NO: 16925 - DNA, 20 bp, synthetic construct
  misc_feature 1..20: note = Description of Artificial Sequence: Synthetic oligonucleotide
  misc_feature 1..20: note = Target: ANGPTL4; (+) strand; PAM type: YTN; PAM sequence: CTC
  source 1..20: mol_type = other DNA
ttctttcattttgagacgta

SEQ ID NO: 16926 - DNA, 20 bp, synthetic construct
  misc_feature 1..20: note = Description of Artificial Sequence: Synthetic oligonucleotide
  misc_feature 1..20: note = Target: ANGPTL4; (+) strand; PAM type: YTN; PAM sequence: CTT
  source 1..20: mol_type = other DNA
ctttcattttgagacgtact

SEQ ID NO: 16927 - DNA, 20 bp, synthetic construct
  misc_feature 1..20: note = Description of Artificial Sequence: Synthetic oligonucleotide
  misc_feature 1..20: note = Target: ANGPTL4; (+) strand; PAM type: YTN; PAM sequence: TTC
  source 1..20: mol_type = other DNA
tttcattttgagacgtactc

SEQ ID NO: 16928 - DNA, 20 bp, synthetic construct
  misc_feature 1..20: note = Description of Artificial Sequence: Synthetic oligonucleotide
  misc_feature 1..20: note = Target: ANGPTL4; (+) strand; PAM type: YTN; PAM sequence: CTT
  source 1..20: mol_type = other DNA
tcattttgagacgtactctg

SEQ ID NO: 16929 - DNA, 20 bp, synthetic construct
  misc_feature 1..20: note = Description of Artificial Sequence: Synthetic oligonucleotide
  misc_feature 1..20: note = Target: ANGPTL4; (+) strand; PAM type: YTN; PAM sequence: TTT
  source 1..20: mol_type = other DNA
cattttgagacgtactctgg

SEQ ID NO: 16930 - DNA, 20 bp, synthetic construct
  misc_feature 1..20: note = Description of Artificial Sequence: Synthetic oligonucleotide
  misc_feature 1..20: note = Target: ANGPTL4; (+) strand; PAM type: YTN; PAM sequence: TTC
  source 1..20: mol_type = other DNA
attttgagacgtactctggc

SEQ ID NO: 16931 - DNA, 20 bp, synthetic construct
  misc_feature 1..20: note = Description of Artificial Sequence: Synthetic oligonucleotide
  misc_feature 1..20: note = Target: ANGPTL4; (+) strand; PAM type: YTN; PAM sequence: TTT
  source 1..20: mol_type = other DNA
tgagacgtactctggctctg

SEQ ID NO: 16932 - DNA, 20 bp, synthetic construct
  misc_feature 1..20: note = Description of Artificial Sequence: Synthetic oligonucleotide
  misc_feature 1..20: note = Target: ANGPTL4; (+) strand; PAM type: YTN; PAM sequence: TTT
  source 1..20: mol_type = other DNA
gagacgtactctggctctgt

SEQ ID NO: 16933 - DNA, 20 bp, synthetic construct
  misc_feature 1..20: note = Description of Artificial Sequence: Synthetic oligonucleotide
  misc_feature 1..20: note = Target: ANGPTL4; (+) strand; PAM type: YTN; PAM sequence: TTG
  source 1..20: mol_type = other DNA
agacgtactctggctctgtc

SEQ ID NO: 16934 - DNA, 20 bp, synthetic construct
  misc_feature 1..20: note = Description of Artificial Sequence: Synthetic oligonucleotide
  misc_feature 1..20: note = Target: ANGPTL4; (+) strand; PAM type: YTN; PAM sequence: CTC
  source 1..20: mol_type = other DNA
tggctctgtcgcccaggctg

SEQ ID NO: 16935 - DNA, 20 bp, synthetic construct
  misc_feature 1..20: note = Description of Artificial Sequence: Synthetic oligonucleotide
  misc_feature 1..20: note = Target: ANGPTL4; (+) strand; PAM type: YTN; PAM sequence: CTG
  source 1..20: mol_type = other DNA
gctctgtcgcccaggctgga

SEQ ID NO: 16936 - DNA, 20 bp, synthetic construct
  misc_feature 1..20: note = Description of Artificial Sequence: Synthetic oligonucleotide
  misc_feature 1..20: note = Target: ANGPTL4; (+) strand; PAM type: YTN; PAM sequence: CTC
  source 1..20: mol_type = other DNA
tgtcgcccaggctggagcgc

SEQ ID NO: 16937 - DNA, 20 bp, synthetic construct
  misc_feature 1..20: note = Description of Artificial Sequence: Synthetic oligonucleotide
  misc_feature 1..20: note = Target: ANGPTL4; (+) strand; PAM type: YTN; PAM sequence: CTG
  source 1..20: mol_type = other DNA
tcgcccaggctggagcgcaa

SEQ ID NO: 16938 - DNA, 20 bp, synthetic construct
  misc_feature 1..20: note = Description of Artificial Sequence: Synthetic oligonucleotide
  misc_feature 1..20: note = Target: ANGPTL4; (+) strand; PAM type: YTN; PAM sequence: CTG
  source 1..20: mol_type = other DNA
gagcgcaatggcgccatctc

SEQ ID NO: 16939 - DNA, 20 bp, synthetic construct
  misc_feature 1..20: note = Description of Artificial Sequence: Synthetic oligonucleotide
  misc_feature 1..20: note = Target: ANGPTL4; (+) strand; PAM type: YTN; PAM sequence: CTC
  source 1..20: mol_type = other DNA
ggcgcactgcaacctccacc

SEQ ID NO: 16940 - DNA, 20 bp, synthetic construct
  misc_feature 1..20: note = Description of Artificial Sequence: Synthetic oligonucleotide
  misc_feature 1..20: note = Target: ANGPTL4; (+) strand; PAM type: YTN; PAM sequence: CTG
  source 1..20: mol_type = other DNA
caacctccacctcccgggtt

SEQ ID NO: 16941 - DNA, 20 bp, synthetic construct
  misc_feature 1..20: note = Description of Artificial Sequence: Synthetic oligonucleotide
  misc_feature 1..20: note = Target: ANGPTL4; (+) strand; PAM type: YTN; PAM sequence: CTC
  source 1..20: mol_type = other DNA
cacctcccgggttcaagcga

SEQ ID NO: 16942 - DNA, 20 bp, synthetic construct
  misc_feature 1..20: note = Description of Artificial Sequence: Synthetic oligonucleotide
  misc_feature 1..20: note = Target: ANGPTL4; (+) strand; PAM type: YTN; PAM sequence: CTC
  source 1..20: mol_type = other DNA
ccgggttcaagcgattctac

SEQ ID NO: 16943 - DNA, 20 bp, synthetic construct
  misc_feature 1..20: note = Description of Artificial Sequence: Synthetic oligonucleotide
  misc_feature 1..20: note = Target: ANGPTL4; (+) strand; PAM type: YTN; PAM sequence: TTC
  source 1..20: mol_type = other DNA
aagcgattctactgcctcag

SEQ ID NO: 16944 - DNA, 20 bp, synthetic construct
  misc_feature 1..20: note = Description of Artificial Sequence: Synthetic oligonucleotide
  misc_feature 1..20: note = Target: ANGPTL4; (+) strand; PAM type: YTN; PAM sequence: TTC
  source 1..20: mol_type = other DNA
tactgcctcagcctcccgag

SEQ ID NO: 16945 - DNA, 20 bp, synthetic construct
  misc_feature 1..20: note = Description of Artificial Sequence: Synthetic oligonucleotide
  misc_feature 1..20: note = Target: ANGPTL4; (+) strand; PAM type: YTN; PAM sequence: CTA
  source 1..20: mol_type = other DNA
ctgcctcagcctcccgagta

SEQ ID NO: 16946 - DNA, 20 bp, synthetic construct
  misc_feature 1..20: note = Description of Artificial Sequence: Synthetic oligonucleotide
  misc_feature 1..20: note = Target: ANGPTL4; (+) strand; PAM type: YTN; PAM sequence: CTG
  source 1..20: mol_type = other DNA
cctcagcctcccgagtagct

SEQ ID NO: 16947 - DNA, 20 bp, synthetic construct
  misc_feature 1..20: note = Description of Artificial Sequence: Synthetic oligonucleotide
  misc_feature 1..20: note = Target: ANGPTL4; (+) strand; PAM type: YTN; PAM sequence: CTC
  source 1..20: mol_type = other DNA
agcctcccgagtagctggga

SEQ ID NO: 16948 - DNA, 20 bp, synthetic construct
  misc_feature 1..20: note = Description of Artificial Sequence: Synthetic oligonucleotide
  misc_feature 1..20: note = Target: ANGPTL4; (+) strand; PAM type: YTN; PAM sequence: CTC
  source 1..20: mol_type = other DNA
ccgagtagctgggactacag

SEQ ID NO: 16949 - DNA, 20 bp, synthetic construct
  misc_feature 1..20: note = Description of Artificial Sequence: Synthetic oligonucleotide
  misc_feature 1..20: note = Target: ANGPTL4; (+) strand; PAM type: YTN; PAM sequence: CTG
  source 1..20: mol_type = other DNA
ggactacaggcgcgcactac

SEQ ID NO: 16950 - DNA, 20 bp, synthetic construct
  misc_feature 1..20: note = Description of Artificial Sequence: Synthetic oligonucleotide
  misc_feature 1..20: note = Target: ANGPTL4; (+) strand; PAM type: YTN; PAM sequence: CTA
  source 1..20: mol_type = other DNA
caggcgcgcactaccaagcc

SEQ ID NO: 16951 - DNA, 20 bp, synthetic construct
  misc_feature 1..20: note = Description of Artificial Sequence: Synthetic oligonucleotide
  misc_feature 1..20: note = Target: ANGPTL4; (+) strand; PAM type: YTN; PAM sequence: CTA
  source 1..20: mol_type = other DNA
ccaagcccggctaatttttt

SEQ ID NO: 16952 - DNA, 20 bp, synthetic construct
  misc_feature 1..20: note = Description of Artificial Sequence: Synthetic oligonucleotide
  misc_feature 1..20: note = Target: ANGPTL4; (+) strand; PAM type: YTN; PAM sequence: CTA
  source 1..20: mol_type = other DNA
atttttttttgtatttttag

SEQ ID NO: 16953 - DNA, 20 bp, synthetic construct
  misc_feature 1..20: note = Description of Artificial Sequence: Synthetic oligonucleotide
  misc_feature 1..20: note = Target: ANGPTL4; (+) strand; PAM type: YTN; PAM sequence: TTT
  source 1..20: mol_type = other DNA
ttttttgtatttttagtaga

SEQ ID NO: 16954 - DNA, 20 bp, synthetic construct
  misc_feature 1..20: note = Description of Artificial Sequence: Synthetic oligonucleotide
  misc_feature 1..20: note = Target: ANGPTL4; (+) strand; PAM type: YTN; PAM sequence: TTT
  source 1..20: mol_type = other DNA
tttttgtatttttagtagag

SEQ ID NO: 16955 - DNA, 20 bp, synthetic construct
  misc_feature 1..20: note = Description of Artificial Sequence: Synthetic oligonucleotide
  misc_feature 1..20: note = Target: ANGPTL4; (+) strand; PAM type: YTN; PAM sequence: TTT
  source 1..20: mol_type = other DNA
ttttgtatttttagtagaga

SEQ ID NO: 16956 - DNA, 20 bp, synthetic construct
  misc_feature 1..20: note = Description of Artificial Sequence: Synthetic oligonucleotide
  misc_feature 1..20: note = Target: ANGPTL4; (+) strand; PAM type: YTN; PAM sequence: TTT
  source 1..20: mol_type = other DNA
tttgtatttttagtagagac

SEQ ID NO: 16957 - DNA, 20 bp, synthetic construct
  misc_feature 1..20: note = Description of Artificial Sequence: Synthetic oligonucleotide
  misc_feature 1..20: note = Target: ANGPTL4; (+) strand; PAM type: YTN; PAM sequence: TTT
  source 1..20: mol_type = other DNA
ttgtatttttagtagagact

SEQ ID NO: 16958 - DNA, 20 bp, synthetic construct
  misc_feature 1..20: note = Description of Artificial Sequence: Synthetic oligonucleotide
  misc_feature 1..20: note = Target: ANGPTL4; (+) strand; PAM type: YTN; PAM sequence: TTT
  source 1..20: mol_type = other DNA
tgtatttttagtagagactg

SEQ ID NO: 16959 - DNA, 20 bp, synthetic construct
  misc_feature 1..20: note = Description of Artificial Sequence: Synthetic oligonucleotide
  misc_feature 1..20: note = Target: ANGPTL4; (+) strand; PAM type: YTN; PAM sequence: TTT
  source 1..20: mol_type = other DNA
gtatttttagtagagactgg

SEQ ID NO: 16960 - DNA, 20 bp, synthetic construct
  misc_feature 1..20: note = Description of Artificial Sequence: Synthetic oligonucleotide
  misc_feature 1..20: note = Target: ANGPTL4; (+) strand; PAM type: YTN; PAM sequence: TTG
  source 1..20: mol_type = other DNA
tatttttagtagagactggg

SEQ ID NO: 16961 - DNA, 20 bp, synthetic construct
  misc_feature 1..20: note = Description of Artificial Sequence: Synthetic oligonucleotide
  misc_feature 1..20: note = Target: ANGPTL4; (+) strand; PAM type: YTN; PAM sequence: TTT
  source 1..20: mol_type = other DNA
ttagtagagactgggtttca

SEQ ID NO: 16962 - DNA, 20 bp, synthetic construct
  misc_feature 1..20: note = Description of Artificial Sequence: Synthetic oligonucleotide
  misc_feature 1..20: note = Target: ANGPTL4; (+) strand; PAM type: YTN; PAM sequence: TTT
  source 1..20: mol_type = other DNA
tagtagagactgggtttcac

SEQ ID NO: 16963 - DNA, 20 bp, synthetic construct
  misc_feature 1..20: note = Description of Artificial Sequence: Synthetic oligonucleotide
  misc_feature 1..20: note = Target: ANGPTL4; (+) strand; PAM type: YTN; PAM sequence: TTT
  source 1..20: mol_type = other DNA
agtagagactgggtttcacg

SEQ ID NO: 16964 - DNA, 20 bp, synthetic construct
  misc_feature 1..20: note = Description of Artificial Sequence: Synthetic oligonucleotide
  misc_feature 1..20: note = Target: ANGPTL4; (+) strand; PAM type: YTN; PAM sequence: TTA
  source 1..20: mol_type = other DNA
gtagagactgggtttcacga

SEQ ID NO: 16965 - DNA, 20 bp, synthetic construct
  misc_feature 1..20: note = Description of Artificial Sequence: Synthetic oligonucleotide
  misc_feature 1..20: note = Target: ANGPTL4; (+) strand; PAM type: YTN; PAM sequence: CTG
  source 1..20: mol_type = other DNA
ggtttcacgatgttggccgg

SEQ ID NO: 16966 - DNA, 20 bp, synthetic construct
  misc_feature 1..20: note = Description of Artificial Sequence: Synthetic oligonucleotide
  misc_feature 1..20: note = Target: ANGPTL4; (+) strand; PAM type: YTN; PAM sequence: TTT
  source 1..20: mol_type = other DNA
cacgatgttggccgggctgg

SEQ ID NO: 16967 - DNA, 20 bp, synthetic construct
  misc_feature 1..20: note = Description of Artificial Sequence: Synthetic oligonucleotide
  misc_feature 1..20: note = Target: ANGPTL4; (+) strand; PAM type: YTN; PAM sequence: TTC
  source 1..20: mol_type = other DNA
acgatgttggccgggctggt

SEQ ID NO: 16968 - DNA, 20 bp, synthetic construct
  misc_feature 1..20: note = Description of Artificial Sequence: Synthetic oligonucleotide
  misc_feature 1..20: note = Target: ANGPTL4; (+) strand; PAM type: YTN; PAM sequence: TTG
  source 1..20: mol_type = other DNA
gccgggctggtctggaagtc

SEQ ID NO: 16969 - DNA, 20 bp, synthetic construct
  misc_feature 1..20: note = Description of Artificial Sequence: Synthetic oligonucleotide
  misc_feature 1..20: note = Target: ANGPTL4; (+) strand; PAM type: YTN; PAM sequence: CTG
  source 1..20: mol_type = other DNA
gtctggaagtcttgacctca

SEQ ID NO: 16970 - DNA, 20 bp, synthetic construct
  misc_feature 1..20: note = Description of Artificial Sequence: Synthetic oligonucleotide
  misc_feature 1..20: note = Target: ANGPTL4; (+) strand; PAM type: YTN; PAM sequence: CTG
  source 1..20: mol_type = other DNA
gaagtcttgacctcaagcgt

SEQ ID NO: 16971 - DNA, 20 bp, synthetic construct
  misc_feature 1..20: note = Description of Artificial Sequence: Synthetic oligonucleotide
  misc_feature 1..20: note = Target: ANGPTL4; (+) strand; PAM type: YTN; PAM sequence: CTT
  source 1..20: mol_type = other DNA
gacctcaagcgtgcgccctc

SEQ ID NO: 16972 - DNA, 20 bp, synthetic construct
  misc_feature 1..20: note = Description of Artificial Sequence: Synthetic oligonucleotide
  misc_feature 1..20: note = Target: ANGPTL4; (+) strand; PAM type: YTN; PAM sequence: TTG
  source 1..20: mol_type = other DNA
acctcaagcgtgcgccctct

SEQ ID NO: 16973 - DNA, 20 bp, synthetic construct
  misc_feature 1..20: note = Description of Artificial Sequence: Synthetic oligonucleotide
  misc_feature 1..20: note = Target: ANGPTL4; (+) strand; PAM type: YTN; PAM sequence: CTC
  source 1..20: mol_type = other DNA
aagcgtgcgccctctccgcc

SEQ ID NO: 16974 - DNA, 20 bp, synthetic construct
  misc_feature 1..20: note = Description of Artificial Sequence: Synthetic oligonucleotide
  misc_feature 1..20: note = Target: ANGPTL4; (+) strand; PAM type: YTN; PAM sequence: CTC
  source 1..20: mol_type = other DNA
tccgccactgggtaaggcgg

SEQ ID NO: 16975 - DNA, 20 bp, synthetic construct
  misc_feature 1..20: note = Description of Artificial Sequence: Synthetic oligonucleotide
  misc_feature 1..20: note = Target: ANGPTL4; (+) strand; PAM type: YTN; PAM sequence: CTC
  source 1..20: mol_type = other DNA
cgccactgggtaaggcgggg

SEQ ID NO: 16976 - DNA, 20 bp, synthetic construct
  misc_feature 1..20: note = Description of Artificial Sequence: Synthetic oligonucleotide
  misc_feature 1..20: note = Target: ANGPTL4; (+) strand; PAM type: YTN; PAM sequence: CTG
  source 1..20: mol_type = other DNA
ggtaaggcgggggcggaata

SEQ ID NO: 16977 - DNA, 20 bp, synthetic construct
  misc_feature 1..20: note = Description of Artificial Sequence: Synthetic oligonucleotide
  misc_feature 1..20: note = Target: ANGPTL4; (+) strand; PAM type: YTN; PAM sequence: CTT
  source 1..20: mol_type = other DNA
gcaatttcacactagaggcg

SEQ ID NO: 16978 - DNA, 20 bp, synthetic construct
  misc_feature 1..20: note = Description of Artificial Sequence: Synthetic oligonucleotide
  misc_feature 1..20: note = Target: ANGPTL4; (+) strand; PAM type: YTN; PAM sequence: TTG
  source 1..20: mol_type = other DNA
caatttcacactagaggcgg

SEQ ID NO: 16979 - DNA, 20 bp, synthetic construct
  misc_feature 1..20: note = Description of Artificial Sequence: Synthetic oligonucleotide
  misc_feature 1..20: note = Target: ANGPTL4; (+) strand; PAM type: YTN; PAM sequence: TTT
  source 1..20: mol_type = other DNA
cacactagaggcgggcaccg

SEQ ID NO: 16980 - DNA, 20 bp, synthetic construct
  misc_feature 1..20: note = Description of Artificial Sequence: Synthetic oligonucleotide
  misc_feature 1..20: note = Target: ANGPTL4; (+) strand; PAM type: YTN; PAM sequence: TTC
  source 1..20: mol_type = other DNA
acactagaggcgggcaccgt

SEQ ID NO: 16981 - DNA, 20 bp, synthetic construct
  misc_feature 1..20: note = Description of Artificial Sequence: Synthetic oligonucleotide
  misc_feature 1..20: note = Target: ANGPTL4; (+) strand; PAM type: YTN; PAM sequence: CTA
  source 1..20: mol_type = other DNA
gaggcgggcaccgtggggga

SEQ ID NO: 16982 - DNA, 20 bp, synthetic construct
  misc_feature 1..20: note = Description of Artificial Sequence: Synthetic oligonucleotide
  misc_feature 1..20: note = Target: ANGPTL4; (+) strand; PAM type: YTN; PAM sequence: CTC
  source 1..20: mol_type = other DNA
ccacggttcgtagaggaagg

SEQ ID NO: 16983 - DNA, 20 bp, synthetic construct
  misc_feature 1..20: note = Description of Artificial Sequence: Synthetic oligonucleotide
  misc_feature 1..20: note = Target: ANGPTL4; (+) strand; PAM type: YTN; PAM sequence: TTC
  source 1..20: mol_type = other DNA
gtagaggaaggcctgcctga

SEQ ID NO: 16984 - DNA, 20 bp, synthetic construct
  misc_feature 1..20: note = Description of Artificial Sequence: Synthetic oligonucleotide
  misc_feature 1..20: note = Target: ANGPTL4; (+) strand; PAM type: YTN; PAM sequence: CTG
  source 1..20: mol_type = other DNA
cctgagcctggagcgggggc

SEQ ID NO: 16985 - DNA, 20 bp, synthetic construct
  misc_feature 1..20: note = Description of Artificial Sequence: Synthetic oligonucleotide
  misc_feature 1..20: note = Target: ANGPTL4; (+) strand; PAM type: YTN; PAM sequence: CTG
  source 1..20: mol_type = other DNA
agcctggagcgggggcggga

SEQ ID NO: 16986 - DNA, 20 bp, synthetic construct
  misc_feature 1..20: note = Description of Artificial Sequence: Synthetic oligonucleotide
  misc_feature 1..20: note = Target: ANGPTL4; (+) strand; PAM type: YTN; PAM sequence: CTG
  source 1..20: mol_type = other DNA
gagcgggggcgggagagcca

SEQ ID NO: 16987 - DNA, 20 bp, synthetic construct
  misc_feature 1..20: note = Description of Artificial Sequence: Synthetic oligonucleotide
  misc_feature 1..20: note = Target: ANGPTL4; (+) strand; PAM type: YTN; PAM sequence: TTT
  source 1..20: mol_type = other DNA
ggcatccccagggcatcccc

SEQ ID NO: 16988 - DNA, 20 bp, synthetic construct
  misc_feature 1..20: note = Description of Artificial Sequence: Synthetic oligonucleotide
  misc_feature 1..20: note = Target: ANGPTL4; (+) strand; PAM type: YTN; PAM sequence: TTG
  source 1..20: mol_type = other DNA
gcatccccagggcatccccc

SEQ ID NO: 16989 - DNA, 20 bp, synthetic construct
  misc_feature 1..20: note = Description of Artificial Sequence: Synthetic oligonucleotide
  misc_feature 1..20: note = Target: ANGPTL4; (+) strand; PAM type: YTN; PAM sequence: CTA
  source 1..20: mol_type = other DNA
ccaggcctccagaggacagg

SEQ ID NO: 16990 - DNA, 20 bp, synthetic construct
  misc_feature 1..20: note = Description of Artificial Sequence: Synthetic oligonucleotide
  misc_feature 1..20: note = Target: ANGPTL4; (+) strand; PAM type: YTN; PAM sequence: CTC
  source 1..20: mol_type = other DNA
cagaggacaggaccccaccc

SEQ ID NO: 16991 - DNA, 20 bp, synthetic construct
  misc_feature 1..20: note = Description of Artificial Sequence: Synthetic oligonucleotide
  misc_feature 1..20: note = Target: ANGPTL4; (+) strand; PAM type: YTN; PAM sequence: CTG
  source 1..20: mol_type = other DNA
cccccagcactccccgcacc

SEQ ID NO: 16992 - DNA, 20 bp, synthetic construct
  misc_feature 1..20: note = Description of Artificial Sequence: Synthetic oligonucleotide
  misc_feature 1..20: note = Target: ANGPTL4; (+) strand; PAM type: YTN; PAM sequence: CTC
  source 1..20: mol_type = other DNA
cccgcaccccgcctccaaga

SEQ ID NO: 16993 - DNA, 20 bp, synthetic construct
  misc_feature 1..20: note = Description of Artificial Sequence: Synthetic oligonucleotide
  misc_feature 1..20: note = Target: ANGPTL4; (+) strand; PAM type: YTN; PAM sequence: CTC
  source 1..20: mol_type = other DNA
caagactcctccgcccactc

SEQ ID NO: 16994 - DNA, 20 bp, synthetic construct
  misc_feature 1..20: note = Description of Artificial Sequence: Synthetic oligonucleotide
  misc_feature 1..20: note = Target: ANGPTL4; (+) strand; PAM type: YTN; PAM sequence: CTC
  source 1..20: mol_type = other DNA
ctccgcccactccgcaccca

SEQ ID NO: 16995 - DNA, 20 bp, synthetic construct
  misc_feature 1..20: note = Description of Artificial Sequence: Synthetic oligonucleotide
  misc_feature 1..20: note = Target: ANGPTL4; (+) strand; PAM type: YTN; PAM sequence: CTC
  source 1..20: mol_type = other DNA
cgcccactccgcacccaact

SEQ ID NO: 16996 - DNA, 20 bp, synthetic construct
  misc_feature 1..20: note = Description of Artificial Sequence: Synthetic oligonucleotide
  misc_feature 1..20: note = Target: ANGPTL4; (+) strand; PAM type: YTN; PAM sequence: CTC
  source 1..20: mol_type = other DNA
cgcacccaacttataaaaac

SEQ ID NO: 16997 - DNA, 20 bp, synthetic construct
  misc_feature 1..20: note = Description of Artificial Sequence: Synthetic oligonucleotide
  misc_feature 1..20: note = Target: ANGPTL4; (+) strand; PAM type: YTN; PAM sequence: CTT
  source 1..20: mol_type = other DNA
ataaaaaccgtcctcgggcg

SEQ ID NO: 16998 - DNA, 20 bp, synthetic construct
  misc_feature 1..20: note = Description of Artificial Sequence: Synthetic oligonucleotide
  misc_feature 1..20: note = Target: ANGPTL4; (+) strand; PAM type: YTN; PAM sequence: TTA
  source 1..20: mol_type = other DNA
taaaaaccgtcctcgggcgc

SEQ ID NO: 16999 - DNA, 20 bp, synthetic construct
  misc_feature 1..20: note = Description of Artificial Sequence: Synthetic oligonucleotide
  misc_feature 1..20: note = Target: ANGPTL4; (+) strand; PAM type: YTN; PAM sequence: CTC
  source 1..20: mol_type = other DNA
gggcgcggcggggagaagcc

SEQ ID NO: 17000 - DNA, 20 bp, synthetic construct
  misc_feature 1..20: note = Description of Artificial Sequence: Synthetic oligonucleotide
  misc_feature 1..20: note = Target: ANGPTL4; (+) strand; PAM type: YTN; PAM sequence: CTG
  source 1..20: mol_type = other DNA
agcggatcctcacacgactg

SEQ ID NO: 17001 - DNA, 20 bp, synthetic construct
  misc_feature 1..20: note = Description of Artificial Sequence: Synthetic oligonucleotide
  misc_feature 1..20: note = Target: ANGPTL4; (+) strand; PAM type: YTN; PAM sequence: CTC
  source 1..20: mol_type = other DNA
acacgactgtgatccgattc

SEQ ID NO: 17002 - DNA, 20 bp, synthetic construct
  misc_feature 1..20: note = Description of Artificial Sequence: Synthetic oligonucleotide
  misc_feature 1..20: note = Target: ANGPTL4; (+) strand; PAM type: YTN; PAM sequence: CTG
  source 1..20: mol_type = other DNA
tgatccgattctttccagcg

SEQ ID NO: 17003 - DNA, 20 bp, synthetic construct
  misc_feature 1..20: note = Description of Artificial Sequence: Synthetic oligonucleotide
  misc_feature 1..20: note = Target: ANGPTL4; (+) strand; PAM type: YTN; PAM sequence: TTC
  source 1..20: mol_type = other DNA
tttccagcggcttctgcaac

SEQ ID NO: 17004 - DNA, 20 bp, synthetic construct
  misc_feature 1..20: note = Description of Artificial Sequence: Synthetic oligonucleotide
  misc_feature 1..20: note = Target: ANGPTL4; (+) strand; PAM type: YTN; PAM sequence: CTT
  source 1..20: mol_type = other DNA
tccagcggcttctgcaacca

SEQ ID NO: 17005 - DNA, 20 bp, synthetic construct
  misc_feature 1..20: note = Description of Artificial Sequence: Synthetic oligonucleotide
  misc_feature 1..20: note = Target: ANGPTL4; (+) strand; PAM type: YTN; PAM sequence: TTT
  source 1..20: mol_type = other DNA
ccagcggcttctgcaaccaa

SEQ ID NO: 17006 - DNA, 20 bp, synthetic construct
  misc_feature 1..20: note = Description of Artificial Sequence: Synthetic oligonucleotide
  misc_feature 1..20: note = Target: ANGPTL4; (+) strand; PAM type: YTN; PAM sequence: TTC
  source 1..20: mol_type = other DNA
cagcggcttctgcaaccaag

SEQ ID NO: 17007 - DNA, 20 bp, synthetic construct
  misc_feature 1..20: note = Description of Artificial Sequence: Synthetic oligonucleotide
  misc_feature 1..20: note = Target: ANGPTL4; (+) strand; PAM type: YTN; PAM sequence: CTT
  source 1..20: mol_type = other DNA
ctgcaaccaagcgggtctta

SEQ ID NO: 17008 - DNA, 20 bp, synthetic construct
  misc_feature 1..20: note = Description of Artificial Sequence: Synthetic oligonucleotide
  misc_feature 1..20: note = Target: ANGPTL4; (+) strand; PAM type: YTN; PAM sequence: TTC
  source 1..20: mol_type = other DNA
tgcaaccaagcgggtcttac

SEQ ID NO: 17009 - DNA, 20 bp, synthetic construct
  misc_feature 1..20: note = Description of Artificial Sequence: Synthetic oligonucleotide
  misc_feature 1..20: note = Target: ANGPTL4; (+) strand; PAM type: YTN; PAM sequence: CTG
  source 1..20: mol_type = other DNA
caaccaagcgggtcttaccc

SEQ ID NO: 17010 - DNA, 20 bp, synthetic construct
  misc_feature 1..20: note = Description of Artificial Sequence: Synthetic oligonucleotide
  misc_feature 1..20: note = Target: ANGPTL4; (+) strand; PAM type: YTN; PAM sequence: CTT
  source 1..20: mol_type = other DNA
acccccggtcctccgcgtct

SEQ ID NO: 17011 - DNA, 20 bp, synthetic construct
  misc_feature 1..20: note = Description of Artificial Sequence: Synthetic oligonucleotide
  misc_feature 1..20: note = Target: ANGPTL4; (+) strand; PAM type: YTN; PAM sequence: TTA
  source 1..20: mol_type = other DNA
cccccggtcctccgcgtctc

SEQ ID NO: 17012 - DNA, 20 bp, synthetic construct
  misc_feature 1..20: note = Description of Artificial Sequence: Synthetic oligonucleotide
  misc_feature 1..20: note = Target: ANGPTL4; (+) strand; PAM type: YTN; PAM sequence: CTC
  source 1..20: mol_type = other DNA
cgcgtctccagtcctcgcac

SEQ ID NO: 17013 - DNA, 20 bp, synthetic construct
  misc_feature 1..20: note = Description of Artificial Sequence: Synthetic oligonucleotide
  misc_feature 1..20: note = Target: ANGPTL4; (+) strand; PAM type: YTN; PAM sequence: CTC
  source 1..20: mol_type = other DNA
cagtcctcgcacctggaacc

SEQ ID NO: 17014 - DNA, 20 bp, synthetic construct
  misc_feature 1..20: note = Description of Artificial Sequence: Synthetic oligonucleotide
  misc_feature 1..20: note = Target: ANGPTL4; (+) strand; PAM type: YTN; PAM sequence: CTC
  source 1..20: mol_type = other DNA
gcacctggaaccccaacgtc

SEQ ID NO: 17015 - DNA, 20 bp, synthetic construct
  misc_feature 1..20: note = Description of Artificial Sequence: Synthetic oligonucleotide
  misc_feature 1..20: note = Target: ANGPTL4; (+) strand; PAM type: YTN; PAM sequence: CTG
  source 1..20: mol_type = other DNA
gaaccccaacgtccccgaga

SEQ ID NO: 17016 - DNA, 20 bp, synthetic construct
  misc_feature 1..20: note = Description of Artificial Sequence: Synthetic oligonucleotide
  misc_feature 1..20: note = Target: ANGPTL4; (+) strand; PAM type: YTN; PAM sequence: CTC
  source 1..20: mol_type = other DNA
ccaggctacctaagaggatg

SEQ ID NO: 17017 - DNA, 20 bp, synthetic construct
  misc_feature 1..20: note = Description of Artificial Sequence: Synthetic oligonucleotide
  misc_feature 1..20: note = Target: ANGPTL4; (+) strand; PAM type: YTN; PAM sequence: CTA
  source 1..20: mol_type = other DNA
cctaagaggatgagcggtgc

SEQ ID NO: 17018 - DNA, 20 bp, synthetic construct
  misc_feature 1..20: note = Description of Artificial Sequence: Synthetic oligonucleotide
  misc_feature 1..20: note = Target: ANGPTL4; (+) strand; PAM type: YTN; PAM sequence: CTA
  source 1..20: mol_type = other DNA
agaggatgagcggtgctccg

SEQ ID NO: 17019 - DNA, 20 bp, synthetic construct
  misc_feature 1..20: note = Description of Artificial Sequence: Synthetic oligonucleotide
  misc_feature 1..20: note = Target: ANGPTL4; (+) strand; PAM type: YTN; PAM sequence: CTC
  source 1..20: mol_type = other DNA
cgacggccggggcagccctg

SEQ ID NO: 17020 - DNA, 20 bp, synthetic construct
  misc_feature 1..20: note = Description of Artificial Sequence: Synthetic oligonucleotide
  misc_feature 1..20: note = Target: ANGPTL4; (+) strand; PAM type: YTN; PAM sequence: CTG
  source 1..20: mol_type = other DNA
atgctctgcgccgccaccgc

SEQ ID NO: 17021 - DNA, 20 bp, synthetic construct
  misc_feature 1..20: note = Description of Artificial Sequence: Synthetic oligonucleotide
  misc_feature 1..20: note = Target: ANGPTL4; (+) strand; PAM type: YTN; PAM sequence: CTC
  source 1..20: mol_type = other DNA
tgcgccgccaccgccgtgct

SEQ ID NO: 17022 - DNA, 20 bp, synthetic construct
  misc_feature 1..20: note = Description of Artificial Sequence: Synthetic oligonucleotide
  misc_feature 1..20: note = Target: ANGPTL4; (+) strand; PAM type: YTN; PAM sequence: CTG
  source 1..20: mol_type = other DNA
cgccgccaccgccgtgctac

SEQ ID NO: 17023 - DNA, 20 bp, synthetic construct
  misc_feature 1..20: note = Description of Artificial Sequence: Synthetic oligonucleotide
  misc_feature 1..20: note = Target: ANGPTL4; (+) strand; PAM type: YTN; PAM sequence: CTA
  source 1..20: mol_type = other DNA
ctgagcgctcagggcggacc

SEQ ID NO: 17024 - DNA, 20 bp, synthetic construct
  misc_feature 1..20: note = Description of Artificial Sequence: Synthetic oligonucleotide
  misc_feature 1..20: note = Target: ANGPTL4; (+) strand; PAM type: YTN; PAM sequence: CTG
  source 1..20: mol_type = other DNA
agcgctcagggcggacccgt

SEQ ID NO: 17025 - DNA, 20 bp, synthetic construct
  misc_feature 1..20: note = Description of Artificial Sequence: Synthetic oligonucleotide
  misc_feature 1..20: note = Target: ANGPTL4; (+) strand; PAM type: YTN; PAM sequence: CTC
  source 1..20: mol_type = other DNA
agggcggacccgtgcagtcc

SEQ ID NO: 17026 - DNA, 20 bp, synthetic construct
  misc_feature 1..20: note = Description of Artificial Sequence: Synthetic oligonucleotide
  misc_feature 1..20: note = Target: ANGPTL4; (+) strand; PAM type: YTN; PAM sequence: CTT
  source 1..20: mol_type = other DNA
tgcgtcctgggacgagatga

SEQ ID NO: 17027 - DNA, 20 bp, synthetic construct
  misc_feature 1..20: note = Description of Artificial Sequence: Synthetic oligonucleotide
  misc_feature 1..20: note = Target: ANGPTL4; (+) strand; PAM type: YTN; PAM sequence: TTT
  source 1..20: mol_type = other DNA
gcgtcctgggacgagatgaa

SEQ ID NO: 17028 - DNA, 20 bp, synthetic construct
  misc_feature 1..20: note = Description of Artificial Sequence: Synthetic oligonucleotide
  misc_feature 1..20: note = Target: ANGPTL4; (+) strand; PAM type: YTN; PAM sequence: TTG
  source 1..20: mol_type = other DNA
cgtcctgggacgagatgaat

SEQ ID NO: 17029 - DNA, 20 bp, synthetic construct
  misc_feature 1..20: note = Description of Artificial Sequence: Synthetic oligonucleotide
  misc_feature 1..20: note = Target: ANGPTL4; (+) strand; PAM type: YTN; PAM sequence: CTG
  source 1..20: mol_type = other DNA
ggacgagatgaatgtcctgg

SEQ ID NO: 17030 - DNA, 20 bp, synthetic construct
  misc_feature 1..20: note = Description of Artificial Sequence: Synthetic oligonucleotide
  misc_feature 1..20: note = Target: ANGPTL4; (+) strand; PAM type: YTN; PAM sequence: CTG
  source 1..20: mol_type = other DNA
gcgcacggactcctgcagct

SEQ ID NO: 17031 - DNA, 20 bp, synthetic construct
  misc_feature 1..20: note = Description of Artificial Sequence: Synthetic oligonucleotide
  misc_feature 1..20: note = Target: ANGPTL4; (+) strand; PAM type: YTN; PAM sequence: CTC
  source 1..20: mol_type = other DNA
ctgcagctcggccaggggct

SEQ ID NO: 17032 - DNA, 20 bp, synthetic construct
  misc_feature 1..20: note = Description of Artificial Sequence: Synthetic oligonucleotide
  misc_feature 1..20: note = Target: ANGPTL4; (+) strand; PAM type: YTN; PAM sequence: CTG
  source 1..20: mol_type = other DNA
cagctcggccaggggctgcg

SEQ ID NO: 17033 - DNA, 20 bp, synthetic construct
  misc_feature 1..20: note = Description of Artificial Sequence: Synthetic oligonucleotide
  misc_feature 1..20: note = Target: ANGPTL4; (+) strand; PAM type: YTN; PAM sequence: CTC
  source 1..20: mol_type = other DNA
ggccaggggctgcgcgaaca

SEQ ID NO: 17034 - DNA, 20 bp, synthetic construct
  misc_feature 1..20: note = Description of Artificial Sequence: Synthetic oligonucleotide
  misc_feature 1..20: note = Target: ANGPTL4; (+) strand; PAM type: YTN; PAM sequence: CTG
  source 1..20: mol_type = other DNA
cgcgaacacgcggagcgcac

SEQ ID NO: 17035 - DNA, 20 bp, synthetic construct
  misc_feature 1..20: note = Description of Artificial Sequence: Synthetic oligonucleotide
  misc_feature 1..20: note = Target: ANGPTL4; (+) strand; PAM type: YTN; PAM sequence: CTG
  source 1..20: mol_type = other DNA
agcgcgctggagcggcgcct

SEQ ID NO: 17036 - DNA, 20 bp, synthetic construct
  misc_feature 1..20: note = Description of Artificial Sequence: Synthetic oligonucleotide
  misc_feature 1..20: note = Target: ANGPTL4; (+) strand; PAM type: YTN; PAM sequence: CTG
  source 1..20: mol_type = other DNA
gagcggcgcctgagcgcgtg

SEQ ID NO: 17037 - DNA, 20 bp, synthetic construct
  misc_feature 1..20: note = Description of Artificial Sequence: Synthetic oligonucleotide
  misc_feature 1..20: note = Target: ANGPTL4; (+) strand; PAM type: YTN; PAM sequence: CTG
  source 1..20: mol_type = other DNA
agcgcgtgcgggtccgcctg

SEQ ID NO: 17038 - DNA, 20 bp, synthetic construct
  misc_feature 1..20: note = Description of Artificial Sequence: Synthetic oligonucleotide
  misc_feature 1..20: note = Target: ANGPTL4; (+) strand; PAM type: YTN; PAM sequence: CTG
  source 1..20: mol_type = other DNA
tcagggaaccgaggggtcca

SEQ ID NO: 17039 - DNA, 20 bp, synthetic construct
  misc_feature 1..20: note = Description of Artificial Sequence: Synthetic oligonucleotide
  misc_feature 1..20: note = Target: ANGPTL4; (+) strand; PAM type: YTN; PAM sequence: CTC
  source 1..20: mol_type = other DNA
ccgttagcccctgagagccg

SEQ ID NO: 17040 - DNA, 20 bp, synthetic construct
  misc_feature 1..20: note = Description of Artificial Sequence: Synthetic oligonucleotide
  misc_feature 1..20: note = Target: ANGPTL4; (+) strand; PAM type: YTN; PAM sequence: TTA
  source 1..20: mol_type = other DNA
gcccctgagagccgggtgga

SEQ ID NO: 17041 - DNA, 20 bp, synthetic construct
  misc_feature 1..20: note = Description of Artificial Sequence: Synthetic oligonucleotide
  misc_feature 1..20: note = Target: ANGPTL4; (+) strand; PAM type: YTN; PAM sequence: CTG
  source 1..20: mol_type = other DNA
agagccgggtggaccctgag

SEQ ID NO: 17042 - DNA, 20 bp, synthetic construct
  misc_feature 1..20: note = Description of Artificial Sequence: Synthetic oligonucleotide
  misc_feature 1..20: note = Target: ANGPTL4; (+) strand; PAM type: YTN; PAM sequence: CTG
  source 1..20: mol_type = other DNA
aggtccttcacagcctgcag

SEQ ID NO: 17043 - DNA, 20 bp, synthetic construct
  misc_feature 1..20: note = Description of Artificial Sequence: Synthetic oligonucleotide
  misc_feature 1..20: note = Target: ANGPTL4; (+) strand; PAM type: YTN; PAM sequence: CTT
  source 1..20: mol_type = other DNA
cacagcctgcaggtacgtgt

SEQ ID NO: 17044 - DNA, 20 bp, synthetic construct
  misc_feature 1..20: note = Description of Artificial Sequence: Synthetic oligonucleotide
  misc_feature 1..20: note = Target: ANGPTL4; (+) strand; PAM type: YTN; PAM sequence: TTC
  source 1..20: mol_type = other DNA
acagcctgcaggtacgtgtc

SEQ ID NO: 17045 - DNA, 20 bp, synthetic construct
  misc_feature 1..20: note = Description of Artificial Sequence: Synthetic oligonucleotide
  misc_feature 1..20: note = Target: ANGPTL4; (+) strand; PAM type: YTN; PAM sequence: CTG
  source 1..20: mol_type = other DNA
caggtacgtgtccccagggc

SEQ ID NO: 17046 - DNA, 20 bp, synthetic construct
  misc_feature 1..20: note = Description of Artificial Sequence: Synthetic oligonucleotide
  misc_feature 1..20: note = Target: ANGPTL4; (+) strand; PAM type: YTN; PAM sequence: CTG
  source 1..20: mol_type = other DNA
gttctccgcgcccctagtgg

SEQ ID NO: 17047 - DNA, 20 bp, synthetic construct
  misc_feature 1..20: note = Description of Artificial Sequence: Synthetic oligonucleotide
  misc_feature 1..20: note = Target: ANGPTL4; (+) strand; PAM type: YTN; PAM sequence: TTC
  source 1..20: mol_type = other DNA
tccgcgcccctagtggctct

SEQ ID NO: 17048 - DNA, 20 bp, synthetic construct
  misc_feature 1..20: note = Description of Artificial Sequence: Synthetic oligonucleotide
  misc_feature 1..20: note = Target: ANGPTL4; (+) strand; PAM type: YTN; PAM sequence: CTC
  source 1..20: mol_type = other DNA
cgcgcccctagtggctctcc

SEQ ID NO: 17049 - DNA, 20 bp, synthetic construct
  misc_feature 1..20: note = Description of Artificial Sequence: Synthetic oligonucleotide
  misc_feature 1..20: note = Target: ANGPTL4; (+) strand; PAM type: YTN; PAM sequence: CTA
  source 1..20: mol_type = other DNA
gtggctctcctggcttggaa

SEQ ID NO: 17050 - DNA, 20 bp, synthetic construct
  misc_feature 1..20: note = Description of Artificial Sequence: Synthetic oligonucleotide
  misc_feature 1..20: note = Target: ANGPTL4; (+) strand; PAM type: YTN; PAM sequence: CTC
  source 1..20: mol_type = other DNA
tcctggcttggaagggtatg

SEQ ID NO: 17051 - DNA, 20 bp, synthetic construct
  misc_feature 1..20: note = Description of Artificial Sequence: Synthetic oligonucleotide
  misc_feature 1..20: note = Target: ANGPTL4; (+) strand; PAM type: YTN; PAM sequence: CTC
  source 1..20: mol_type = other DNA
ctggcttggaagggtatgga

SEQ ID NO: 17052 - DNA, 20 bp, synthetic construct
  misc_feature 1..20: note = Description of Artificial Sequence: Synthetic oligonucleotide
  misc_feature 1..20: note = Target: ANGPTL4; (+) strand; PAM type: YTN; PAM sequence: CTG
  source 1..20: mol_type = other DNA
gcttggaagggtatggacag

SEQ ID NO: 17053 - DNA, 20 bp, synthetic construct
  misc_feature 1..20: note = Description of Artificial Sequence: Synthetic oligonucleotide
  misc_feature 1..20: note = Target: ANGPTL4; (+) strand; PAM type: YTN; PAM sequence: CTT
  source 1..20: mol_type = other DNA
ggaagggtatggacaggagt

SEQ ID NO: 17054 - DNA, 20 bp, synthetic construct
  misc_feature 1..20: note = Description of Artificial Sequence: Synthetic oligonucleotide
  misc_feature 1..20: note = Target: ANGPTL4; (+) strand; PAM type: YTN; PAM sequence: TTG
  source 1..20: mol_type = other DNA
gaagggtatggacaggagtg

SEQ ID NO: 17055 - DNA, 20 bp, synthetic construct
  misc_feature 1..20: note = Description of Artificial Sequence: Synthetic oligonucleotide
  misc_feature 1..20: note = Target: ANGPTL4; (+) strand; PAM type: YTN; PAM sequence: CTG
  source 1..20: mol_type = other DNA
tggctccctgggcttccctg

SEQ ID NO: 17056 - DNA, 20 bp, synthetic construct
  misc_feature 1..20: note = Description of Artificial Sequence: Synthetic oligonucleotide
  misc_feature 1..20: note = Target: ANGPTL4; (+) strand; PAM type: YTN; PAM sequence: CTC
  source 1..20: mol_type = other DNA
cctgggcttccctgcgtcaa

SEQ ID NO: 17057 - DNA, 20 bp, synthetic construct
  misc_feature 1..20: note = Description of Artificial Sequence: Synthetic oligonucleotide
  misc_feature 1..20: note = Target: ANGPTL4; (+) strand; PAM type: YTN; PAM sequence: CTG
  source 1..20: mol_type = other DNA
ggcttccctgcgtcaaggga

SEQ ID NO: 17058 - DNA, 20 bp, synthetic construct
  misc_feature 1..20: note = Description of Artificial Sequence: Synthetic oligonucleotide
  misc_feature 1..20: note = Target: ANGPTL4; (+) strand; PAM type: YTN; PAM sequence: CTT
  source 1..20: mol_type = other DNA
ccctgcgtcaagggatgggc

SEQ ID NO: 17059 - DNA, 20 bp, synthetic construct
  misc_feature 1..20: note = Description of Artificial Sequence: Synthetic oligonucleotide
  misc_feature 1..20: note = Target: ANGPTL4; (+) strand; PAM type: YTN; PAM sequence: TTC
  source 1..20: mol_type = other DNA
cctgcgtcaagggatgggct

SEQ ID NO: 17060 - DNA, 20 bp, synthetic construct
  misc_feature 1..20: note = Description of Artificial Sequence: Synthetic oligonucleotide
  misc_feature 1..20: note = Target: ANGPTL4; (+) strand; PAM type: YTN; PAM sequence: CTG
  source 1..20: mol_type = other DNA
cgtcaagggatgggctcccc

SEQ ID NO: 17061 - DNA, 20 bp, synthetic construct
  misc_feature 1..20: note = Description of Artificial Sequence: Synthetic oligonucleotide
  misc_feature 1..20: note = Target: ANGPTL4; (+) strand; PAM type: YTN; PAM sequence: CTC
  source 1..20: mol_type = other DNA
cccccttaggaagccgagga

SEQ ID NO: 17062 - DNA, 20 bp, synthetic construct
  misc_feature 1..20: note = Description of Artificial Sequence: Synthetic oligonucleotide
  misc_feature 1..20: note = Target: ANGPTL4; (+) strand; PAM type: YTN; PAM sequence: CTT
  source 1..20: mol_type = other DNA
aggaagccgaggagggaggt

SEQ ID NO: 17063 - DNA, 20 bp, synthetic construct
  misc_feature 1..20: note = Description of Artificial Sequence: Synthetic oligonucleotide
  misc_feature 1..20: note = Target: ANGPTL4; (+) strand; PAM type: YTN; PAM sequence: TTA
  source 1..20: mol_type = other DNA
ggaagccgaggagggaggtt

SEQ ID NO: 17064 - DNA, 20 bp, synthetic construct
  misc_feature 1..20: note = Description of Artificial Sequence: Synthetic oligonucleotide
  misc_feature 1..20: note = Target: ANGPTL4; (+) strand; PAM type: YTN; PAM sequence: TTC
  source 1..20: mol_type = other DNA
gctcaaggccaggaattcaa

SEQ ID NO: 17065 - DNA, 20 bp, synthetic construct
  misc_feature 1..20: note = Description of Artificial Sequence: Synthetic oligonucleotide
  misc_feature 1..20: note = Target: ANGPTL4; (+) strand; PAM type: YTN; PAM sequence: CTC
  source 1..20: mol_type = other DNA
aaggccaggaattcaagacc

SEQ ID NO: 17066 - DNA, 20 bp, synthetic construct
  misc_feature 1..20: note = Description of Artificial Sequence: Synthetic oligonucleotide
  misc_feature 1..20: note = Target: ANGPTL4; (+) strand; PAM type: YTN; PAM sequence: TTC
  source 1..20: mol_type = other DNA
aagaccacctaaagcaaaat

SEQ ID NO: 17067 - DNA, 20 bp, synthetic construct
  misc_feature 1..20: note = Description of Artificial Sequence: Synthetic oligonucleotide
  misc_feature 1..20: note = Target: ANGPTL4; (+) strand; PAM type: YTN; PAM sequence: CTA
  source 1..20: mol_type = other DNA
aagcaaaatagcgagacccc

SEQ ID NO: 17068 - DNA, 20 bp, synthetic construct
  misc_feature 1..20: note = Description of Artificial Sequence: Synthetic oligonucleotide
  misc_feature 1..20: note = Target: ANGPTL4; (+) strand; PAM type: YTN; PAM sequence: CTC
  source 1..20: mol_type = other DNA
ttctacacacacacacacac

SEQ ID NO: 17069 - DNA, 20 bp, synthetic construct
  misc_feature 1..20: note = Description of Artificial Sequence: Synthetic oligonucleotide
  misc_feature 1..20: note = Target: ANGPTL4; (+) strand; PAM type: YTN; PAM sequence: CTT
  source 1..20: mol_type = other DNA
ctacacacacacacacacac

SEQ ID NO: 17070 - DNA, 20 bp, synthetic construct
  misc_feature 1..20: note = Description of Artificial Sequence: Synthetic oligonucleotide
  misc_feature 1..20: note = Target: ANGPTL4; (+) strand; PAM type: YTN; PAM sequence: TTC
  source 1..20: mol_type = other DNA
tacacacacacacacacaca

SEQ ID NO: 17071 - DNA, 20 bp, synthetic construct
  misc_feature 1..20: note = Description of Artificial Sequence: Synthetic oligonucleotide
  misc_feature 1..20: note = Target: ANGPTL4; (+) strand; PAM type: YTN; PAM sequence: CTA
  source 1..20: mol_type = other DNA
cacacacacacacacacaca

SEQ ID NO: 17072 - DNA, 20 bp, synthetic construct
  misc_feature 1..20: note = Description of Artificial Sequence: Synthetic oligonucleotide
  misc_feature 1..20: note = Target: ANGPTL4; (+) strand; PAM type: YTN; PAM sequence: TTA
  source 1..20: mol_type = other DNA
aaaaacgaccgggcgcagtg

SEQ ID NO: 17073 - DNA, 20 bp, synthetic construct
  misc_feature 1..20: note = Description of Artificial Sequence: Synthetic oligonucleotide
  misc_feature 1..20: note = Target: ANGPTL4; (+) strand; PAM type: YTN; PAM sequence: CTC
  source 1..20: mol_type = other DNA
acggagcctccacctgctgt

SEQ ID NO: 17074 - DNA, 20 bp, synthetic construct
  misc_feature 1..20: note = Description of Artificial Sequence: Synthetic oligonucleotide
  misc_feature 1..20: note = Target: ANGPTL4; (+) strand; PAM type: YTN; PAM sequence: CTC
  source 1..20: mol_type = other DNA
cacctgctgtcgagactagc

SEQ ID NO: 17075 - DNA, 20 bp, synthetic construct
  misc_feature 1..20: note = Description of Artificial Sequence: Synthetic oligonucleotide
  misc_feature 1..20: note = Target: ANGPTL4; (+) strand; PAM type: YTN; PAM sequence: CTG
  source 1..20: mol_type = other DNA
ctgtcgagactagcctggcc

SEQ ID NO: 17076 - DNA, 20 bp, synthetic construct
  misc_feature 1..20: note = Description of Artificial Sequence: Synthetic oligonucleotide
  misc_feature 1..20: note = Target: ANGPTL4; (+) strand; PAM type: YTN; PAM sequence: CTG
  source 1..20: mol_type = other DNA
tcgagactagcctggccaac

SEQ ID NO: 17077 - DNA, 20 bp, synthetic construct
  misc_feature 1..20: note = Description of Artificial Sequence: Synthetic oligonucleotide
  misc_feature 1..20: note = Target: ANGPTL4; (+) strand; PAM type: YTN; PAM sequence: CTA
  source 1..20: mol_type = other DNA
gcctggccaacatggagaaa

SEQ ID NO: 17078 - DNA, 20 bp, synthetic construct
  misc_feature 1..20: note = Description of Artificial Sequence: Synthetic oligonucleotide
  misc_feature 1..20: note = Target: ANGPTL4; (+) strand; PAM type: YTN; PAM sequence: CTG
  source 1..20: mol_type = other DNA
gccaacatggagaaacctcg

SEQ ID NO: 17079 - DNA, 20 bp, synthetic construct
  misc_feature 1..20: note = Description of Artificial Sequence: Synthetic oligonucleotide
  misc_feature 1..20: note = Target: ANGPTL4; (+) strand; PAM type: YTN; PAM sequence: CTC
  source 1..20: mol_type = other DNA
gtctctactaaaaatacaaa

SEQ ID NO: 17080 - DNA, 20 bp, synthetic construct
  misc_feature 1..20: note = Description of Artificial Sequence: Synthetic oligonucleotide
  misc_feature 1..20: note = Target: ANGPTL4; (+) strand; PAM type: YTN; PAM sequence: CTC
  source 1..20: mol_type = other DNA
tactaaaaatacaaaaaatt

SEQ ID NO: 17081 - DNA, 20 bp, synthetic construct
  misc_feature 1..20: note = Description of Artificial Sequence: Synthetic oligonucleotide
  misc_feature 1..20: note = Target: ANGPTL4; (+) strand; PAM type: YTN; PAM sequence: CTA
  source 1..20: mol_type = other DNA
ctaaaaatacaaaaaattag

SEQ ID NO: 17082 - DNA, 20 bp, synthetic construct
  misc_feature 1..20: note = Description of Artificial Sequence: Synthetic oligonucleotide
  misc_feature 1..20: note = Target: ANGPTL4; (+) strand; PAM type: YTN; PAM sequence: CTA
  source 1..20: mol_type = other DNA
aaaatacaaaaaattagcct

SEQ ID NO: 17083 - DNA, 20 bp, synthetic construct
  misc_feature 1..20: note = Description of Artificial Sequence: Synthetic oligonucleotide
  misc_feature 1..20: note = Target: ANGPTL4; (+) strand; PAM type: YTN; PAM sequence: TTA
  source 1..20: mol_type = other DNA
gcctggcatggtgtgcatgc

SEQ ID NO: 17084 - DNA, 20 bp, synthetic construct
  misc_feature 1..20: note = Description of Artificial Sequence: Synthetic oligonucleotide
  misc_feature 1..20: note = Target: ANGPTL4; (+) strand; PAM type: YTN; PAM sequence: CTG
  source 1..20: mol_type = other DNA
gcatggtgtgcatgcctgta

SEQ ID NO: 17085 - DNA, 20 bp, synthetic construct
  misc_feature 1..20: note = Description of Artificial Sequence: Synthetic oligonucleotide
  misc_feature 1..20: note = Target: ANGPTL4; (+) strand; PAM type: YTN; PAM sequence: CTG
  source 1..20: mol_type = other DNA
taatcccagctacttgggag

SEQ ID NO: 17086 - DNA, 20 bp, synthetic construct
  misc_feature 1..20: note = Description of Artificial Sequence: Synthetic oligonucleotide
  misc_feature 1..20: note = Target: ANGPTL4; (+) strand; PAM type: YTN; PAM sequence: CTA
  source 1..20: mol_type = other DNA
cttgggaggctgaggcagga

SEQ ID NO: 17087 - DNA, 20 bp, synthetic construct
  misc_feature 1..20: note = Description of Artificial Sequence: Synthetic oligonucleotide
  misc_feature 1..20: note = Target: ANGPTL4; (+) strand; PAM type: YTN; PAM sequence: CTT
  source 1..20: mol_type = other DNA
gggaggctgaggcaggagaa

SEQ ID NO: 17088 - DNA, 20 bp, synthetic construct
  misc_feature 1..20: note = Description of Artificial Sequence: Synthetic oligonucleotide
  misc_feature 1..20: note = Target: ANGPTL4; (+) strand; PAM type: YTN; PAM sequence: TTG
  source 1..20: mol_type = other DNA
ggaggctgaggcaggagaat

SEQ ID NO: 17089 - DNA, 20 bp, synthetic construct
  misc_feature 1..20: note = Description of Artificial Sequence: Synthetic oligonucleotide
  misc_feature 1..20: note = Target: ANGPTL4; (+) strand; PAM type: YTN; PAM sequence: CTG
  source 1..20: mol_type = other DNA
aggcaggagaatctcttgaa

SEQ ID NO: 17090 - DNA, 20 bp, synthetic construct
  misc_feature 1..20: note = Description of Artificial Sequence: Synthetic oligonucleotide
  misc_feature 1..20: note = Target: ANGPTL4; (+) strand; PAM type: YTN; PAM sequence: CTC
  source 1..20: mol_type = other DNA
ttgaacccgggaggcagagg

SEQ ID NO: 17091 - DNA, 20 bp, synthetic construct
  misc_feature 1..20: note = Description of Artificial Sequence: Synthetic oligonucleotide
  misc_feature 1..20: note = Target: ANGPTL4; (+) strand; PAM type: YTN; PAM sequence: CTT
  source 1..20: mol_type = other DNA
gaacccgggaggcagaggtt

SEQ ID NO: 17092 - DNA, 20 bp, synthetic construct
  misc_feature 1..20: note = Description of Artificial Sequence: Synthetic oligonucleotide
  misc_feature 1..20: note = Target: ANGPTL4; (+) strand; PAM type: YTN; PAM sequence: TTG
  source 1..20: mol_type = other DNA
aacccgggaggcagaggttg

SEQ ID NO: 17093 - DNA, 20 bp, synthetic construct
  misc_feature 1..20: note = Description of Artificial Sequence: Synthetic oligonucleotide
  misc_feature 1..20: note = Target: ANGPTL4; (+) strand; PAM type: YTN; PAM sequence: TTG
  source 1..20: mol_type = other DNA
cagtgagccgagatcgcagc

SEQ ID NO: 17094 - DNA, 20 bp, synthetic construct
  misc_feature 1..20: note = Description of Artificial Sequence: Synthetic oligonucleotide
  misc_feature 1..20: note = Target: ANGPTL4; (+) strand; PAM type: YTN; PAM sequence: CTG
  source 1..20: mol_type = other DNA
cactccagcctgggcaacag

SEQ ID NO: 17095 - DNA, 20 bp, synthetic construct
  misc_feature 1..20: note = Description of Artificial Sequence: Synthetic oligonucleotide
  misc_feature 1..20: note = Target: ANGPTL4; (+) strand; PAM type: YTN; PAM sequence: CTC
  source 1..20: mol_type = other DNA
cagcctgggcaacagagtga

SEQ ID NO: 17096 - DNA, 20 bp, synthetic construct
  misc_feature 1..20: note = Description of Artificial Sequence: Synthetic oligonucleotide
  misc_feature 1..20: note = Target: ANGPTL4; (+) strand; PAM type: YTN; PAM sequence: CTG
  source 1..20: mol_type = other DNA
ggcaacagagtgagactcct

SEQ ID NO: 17097 - DNA, 20 bp, synthetic construct
  misc_feature 1..20: note = Description of Artificial Sequence: Synthetic oligonucleotide
  misc_feature 1..20: note = Target: ANGPTL4; (+) strand; PAM type: YTN; PAM sequence: CTC
  source 1..20: mol_type = other DNA
ctcaaaaaaataatagcgat

SEQ ID NO: 17098 - DNA, 20 bp, synthetic construct
  misc_feature 1..20: note = Description of Artificial Sequence: Synthetic oligonucleotide
  misc_feature 1..20: note = Target: ANGPTL4; (+) strand; PAM type: YTN; PAM sequence: CTC
  source 1..20: mol_type = other DNA
aaaaaaataatagcgataaa

SEQ ID NO: 17099 - DNA, 20 bp, synthetic construct
  misc_feature 1..20: note = Description of Artificial Sequence: Synthetic oligonucleotide
  misc_feature 1..20: note = Target: ANGPTL4; (+) strand; PAM type: YTN; PAM sequence: CTC
  source 1..20: mol_type = other DNA
acgcttgtagtcccagcact

SEQ ID NO: 17100 - DNA, 20 bp, synthetic construct
  misc_feature 1..20: note = Description of Artificial Sequence: Synthetic oligonucleotide
  misc_feature 1..20: note = Target: ANGPTL4; (+) strand; PAM type: YTN; PAM sequence: CTT
  source 1..20: mol_type = other DNA
gtagtcccagcactttggga

SEQ ID NO: 17101 - DNA, 20 bp, synthetic construct
  misc_feature 1..20: note = Description of Artificial Sequence: Synthetic oligonucleotide
  misc_feature 1..20: note = Target: ANGPTL4; (+) strand; PAM type: YTN; PAM sequence: TTG
  source 1..20: mol_type = other DNA
tagtcccagcactttgggag

SEQ ID NO: 17102 - DNA, 20 bp, synthetic construct
  misc_feature 1..20: note = Description of Artificial Sequence: Synthetic oligonucleotide
  misc_feature 1..20: note = Target: ANGPTL4; (+) strand; PAM type: YTN; PAM sequence: CTT
  source 1..20: mol_type = other DNA
tgggagggcgaggccagtgg

SEQ ID NO: 17103 - DNA, 20 bp, synthetic construct
  misc_feature 1..20: note = Description of Artificial Sequence: Synthetic oligonucleotide
  misc_feature 1..20: note = Target: ANGPTL4; (+) strand; PAM type: YTN; PAM sequence: TTT
  source 1..20: mol_type = other DNA
gggagggcgaggccagtgga

SEQ ID NO: 17104 - DNA, 20 bp, synthetic construct
  misc_feature 1..20: note = Description of Artificial Sequence: Synthetic oligonucleotide
  misc_feature 1..20: note = Target: ANGPTL4; (+) strand; PAM type: YTN; PAM sequence: TTG
  source 1..20: mol_type = other DNA
ggagggcgaggccagtggat

SEQ ID NO: 17105 - DNA, 20 bp, synthetic construct
  misc_feature 1..20: note = Description of Artificial Sequence: Synthetic oligonucleotide
  misc_feature 1..20: note = Target: ANGPTL4; (+) strand; PAM type: YTN; PAM sequence: CTG
  source 1..20: mol_type = other DNA
aggtcaggagttcaagacca

SEQ ID NO: 17106 - DNA, 20 bp, synthetic construct
  misc_feature 1..20: note = Description of Artificial Sequence: Synthetic oligonucleotide
  misc_feature 1..20: note = Target: ANGPTL4; (+) strand; PAM type: YTN; PAM sequence: TTC
  source 1..20: mol_type = other DNA
aagaccagcctgaccaacac

SEQ ID NO: 17107 - DNA, 20 bp, synthetic construct
  misc_feature 1..20: note = Description of Artificial Sequence: Synthetic oligonucleotide
  misc_feature 1..20: note = Target: ANGPTL4; (+) strand; PAM type: YTN; PAM sequence: CTG
  source 1..20: mol_type = other DNA
accaacacagtgaaaccccg

SEQ ID NO: 17108 - DNA, 20 bp, synthetic construct
  misc_feature 1..20: note = Description of Artificial Sequence: Synthetic oligonucleotide
  misc_feature 1..20: note = Target: ANGPTL4; (+) strand; PAM type: YTN; PAM sequence: CTC
  source 1..20: mol_type = other DNA
tactaaaaatacaaaaatta

SEQ ID NO: 17109 - DNA, 20 bp, synthetic construct
  misc_feature 1..20: note = Description of Artificial Sequence: Synthetic oligonucleotide
  misc_feature 1..20: note = Target: ANGPTL4; (+) strand; PAM type: YTN; PAM sequence: CTA
  source 1..20: mol_type = other DNA
ctaaaaatacaaaaattagc

SEQ ID NO: 17110 - DNA, 20 bp, synthetic construct
  misc_feature 1..20: note = Description of Artificial Sequence: Synthetic oligonucleotide
  misc_feature 1..20: note = Target: ANGPTL4; (+) strand; PAM type: YTN; PAM sequence: CTA
  source 1..20: mol_type = other DNA
aaaatacaaaaattagctgg

SEQ ID NO: 17111 - DNA, 20 bp, synthetic construct
  misc_feature 1..20: note = Description of Artificial Sequence: Synthetic oligonucleotide
  misc_feature 1..20: note = Target: ANGPTL4; (+) strand; PAM type: YTN; PAM sequence: TTA
  source 1..20: mol_type = other DNA
gctgggtgtggtggtgggcg

SEQ ID NO: 17112 - DNA, 20 bp, synthetic construct
  misc_feature 1..20: note = Description of Artificial Sequence: Synthetic oligonucleotide
  misc_feature 1..20: note = Target: ANGPTL4; (+) strand; PAM type: YTN; PAM sequence: CTG
  source 1..20: mol_type = other DNA
ggtgtggtggtgggcgcctg

SEQ ID NO: 17113 - DNA, 20 bp, synthetic construct
  misc_feature 1..20: note = Description of Artificial Sequence: Synthetic oligonucleotide
  misc_feature 1..20: note = Target: ANGPTL4; (+) strand; PAM type: YTN; PAM sequence: CTG
  source 1..20: mol_type = other DNA
taatcccagctactggggag

SEQ ID NO: 17114 - DNA, 20 bp, synthetic construct
  misc_feature 1..20: note = Description of Artificial Sequence: Synthetic oligonucleotide
  misc_feature 1..20: note = Target: ANGPTL4; (+) strand; PAM type: YTN; PAM sequence: CTA
  source 1..20: mol_type = other DNA
ctggggaggctgaggcagga

SEQ ID NO: 17115 - DNA, 20 bp, synthetic construct
  misc_feature 1..20: note = Description of Artificial Sequence: Synthetic oligonucleotide
  misc_feature 1..20: note = Target: ANGPTL4; (+) strand; PAM type: YTN; PAM sequence: CTG
  source 1..20: mol_type = other DNA
gggaggctgaggcaggagaa

SEQ ID NO: 17116 - DNA, 20 bp, synthetic construct
  misc_feature 1..20: note = Description of Artificial Sequence: Synthetic oligonucleotide
  misc_feature 1..20: note = Target: ANGPTL4; (+) strand; PAM type: YTN; PAM sequence: CTG
  source 1..20: mol_type = other DNA
aggcaggagaacctcttgaa

SEQ ID NO: 17117 - DNA, 20 bp, synthetic construct
  misc_feature 1..20: note = Description of Artificial Sequence: Synthetic oligonucleotide
  misc_feature 1..20: note = Target: ANGPTL4; (+) strand; PAM type: YTN; PAM sequence: CTC
  source 1..20: mol_type = other DNA
ttgaacccgggaggcggagg

SEQ ID NO: 17118 - DNA, 20 bp, synthetic construct
  misc_feature 1..20: note = Description of Artificial Sequence: Synthetic oligonucleotide
  misc_feature 1..20: note = Target: ANGPTL4; (+) strand; PAM type: YTN; PAM sequence: CTT
  source 1..20: mol_type = other DNA
gaacccgggaggcggaggtt

SEQ ID NO: 17119 - DNA, 20 bp, synthetic construct
  misc_feature 1..20: note = Description of Artificial Sequence: Synthetic oligonucleotide
  misc_feature 1..20: note = Target: ANGPTL4; (+) strand; PAM type: YTN; PAM sequence: TTG
  source 1..20: mol_type = other DNA
aacccgggaggcggaggttg

SEQ ID NO: 17120 - DNA, 20 bp, synthetic construct
  misc_feature 1..20: note = Description of Artificial Sequence: Synthetic oligonucleotide
  misc_feature 1..20: note = Target: ANGPTL4; (+) strand; PAM type: YTN; PAM sequence: TTG
  source 1..20: mol_type = other DNA
cagtgagccgggatcatgcc

SEQ ID NO: 17121 - DNA, 20 bp, synthetic construct
  misc_feature 1..20: note = Description of Artificial Sequence: Synthetic oligonucleotide
  misc_feature 1..20: note = Target: ANGPTL4; (+) strand; PAM type: YTN; PAM sequence: TTG
  source 1..20: mol_type = other DNA
cactccagcctgggcgacag

SEQ ID NO: 17122 - DNA, 20 bp, synthetic construct
  misc_feature 1..20: note = Description of Artificial Sequence: Synthetic oligonucleotide
  misc_feature 1..20: note = Target: ANGPTL4; (+) strand; PAM type: YTN; PAM sequence: CTC
  source 1..20: mol_type = other DNA
cagcctgggcgacagagctc

SEQ ID NO: 17123 - DNA, 20 bp, synthetic construct
  misc_feature 1..20: note = Description of Artificial Sequence: Synthetic oligonucleotide
  misc_feature 1..20: note = Target: ANGPTL4; (+) strand; PAM type: YTN; PAM sequence: CTG
  source 1..20: mol_type = other DNA
ggcgacagagctcgactcca

SEQ ID NO: 17124 - DNA, 20 bp, synthetic construct
  misc_feature 1..20: note = Description of Artificial Sequence: Synthetic oligonucleotide
  misc_feature 1..20: note = Target: ANGPTL4; (+) strand; PAM type: YTN; PAM sequence: CTC
  source 1..20: mol_type = other DNA
gactccatctcaaaataata

SEQ ID NO: 17125 - DNA, 20 bp, synthetic construct
  misc_feature 1..20: note = Description of Artificial Sequence: Synthetic oligonucleotide
  misc_feature 1..20: note = Target: ANGPTL4; (+) strand; PAM type: YTN; PAM sequence: CTC
  source 1..20: mol_type = other DNA
catctcaaaataataataat

SEQ ID NO: 17126 - DNA, 20 bp, synthetic construct
  misc_feature 1..20: note = Description of Artificial Sequence: Synthetic oligonucleotide
  misc_feature 1..20: note = Target: ANGPTL4; (+) strand; PAM type: YTN; PAM sequence: CTC
  source 1..20: mol_type = other DNA
aaaataataataataataaa

SEQ ID NO: 17127 - DNA, 20 bp, synthetic construct
  misc_feature 1..20: note = Description of Artificial Sequence: Synthetic oligonucleotide
  misc_feature 1..20: note = Target: ANGPTL4; (+) strand; PAM type: YTN; PAM sequence: TTA
  source 1..20: mol_type = other DNA
gccaggtgtggtggcagcta

SEQ ID NO: 17128 - DNA, 20 bp, synthetic construct
  misc_feature 1..20: note = Description of Artificial Sequence: Synthetic oligonucleotide
  misc_feature 1..20: note = Target: ANGPTL4; (+) strand; PAM type: YTN; PAM sequence: CTA
  source 1..20: mol_type = other DNA
cttgggaggctgagacacaa

SEQ ID NO: 17129 - DNA, 20 bp, synthetic construct
  misc_feature 1..20: note = Description of Artificial Sequence: Synthetic oligonucleotide
  misc_feature 1..20: note = Target: ANGPTL4; (+) strand; PAM type: YTN; PAM sequence: CTT
  source 1..20: mol_type = other DNA
gggaggctgagacacaagaa

SEQ ID NO: 17130 - DNA, 20 bp, synthetic construct
  misc_feature 1..20: note = Description of Artificial Sequence: Synthetic oligonucleotide
  misc_feature 1..20: note = Target: ANGPTL4; (+) strand; PAM type: YTN; PAM sequence: TTG
  source 1..20: mol_type = other DNA
ggaggctgagacacaagaat

SEQ ID NO: 17131 - DNA, 20 bp, synthetic construct
  misc_feature 1..20: note = Description of Artificial Sequence: Synthetic oligonucleotide
  misc_feature 1..20: note = Target: ANGPTL4; (+) strand; PAM type: YTN; PAM sequence: CTG
  source 1..20: mol_type = other DNA
agacacaagaatcacttgag

SEQ ID NO: 17132 - DNA, 20 bp, synthetic construct
  misc_feature 1..20: note = Description of Artificial Sequence: Synthetic oligonucleotide
  misc_feature 1..20: note = Target: ANGPTL4; (+) strand; PAM type: YTN; PAM sequence: CTT
  source 1..20: mol_type = other DNA
gagtctgggaggcagaggtt

SEQ ID NO: 17133 - DNA, 20 bp, synthetic construct
  misc_feature 1..20: note = Description of Artificial Sequence: Synthetic oligonucleotide
  misc_feature 1..20: note = Target: ANGPTL4; (+) strand; PAM type: YTN; PAM sequence: TTG
  source 1..20: mol_type = other DNA
agtctgggaggcagaggttg

SEQ ID NO: 17134 - DNA, 20 bp, synthetic construct
  misc_feature 1..20: note = Description of Artificial Sequence: Synthetic oligonucleotide
  misc_feature 1..20: note = Target: ANGPTL4; (+) strand; PAM type: YTN; PAM sequence: CTG
  source 1..20: mol_type = other DNA
ggaggcagaggttgcagtga

SEQ ID NO: 17135 - DNA, 20 bp, synthetic construct
  misc_feature 1..20: note = Description of Artificial Sequence: Synthetic oligonucleotide
  misc_feature 1..20: note = Target: ANGPTL4; (+) strand; PAM type: YTN; PAM sequence: TTG
  source 1..20: mol_type = other DNA
cagtgagccaagattgcgcc

SEQ ID NO: 17136 - DNA, 20 bp, synthetic construct
  misc_feature 1..20: note = Description of Artificial Sequence: Synthetic oligonucleotide
  misc_feature 1..20: note = Target: ANGPTL4; (+) strand; PAM type: YTN; PAM sequence: TTG
  source 1..20: mol_type = other DNA
cgccactgcactccaacctg

SEQ ID NO: 17137 - DNA, 20 bp, synthetic construct
  misc_feature 1..20: note = Description of Artificial Sequence: Synthetic oligonucleotide
  misc_feature 1..20: note = Target: ANGPTL4; (+) strand; PAM type: YTN; PAM sequence: CTG
  source 1..20: mol_type = other DNA
cactccaacctgggtgacag

SEQ ID NO: 17138 - DNA, 20 bp, synthetic construct
  misc_feature 1..20: note = Description of Artificial Sequence: Synthetic oligonucleotide
  misc_feature 1..20: note = Target: ANGPTL4; (+) strand; PAM type: YTN; PAM sequence: CTC
  source 1..20: mol_type = other DNA
caacctgggtgacagagcga

SEQ ID NO: 17139 - DNA, 20 bp, synthetic construct
  misc_feature 1..20: note = Description of Artificial Sequence: Synthetic oligonucleotide
  misc_feature 1..20: note = Target: ANGPTL4; (+) strand; PAM type: YTN; PAM sequence: CTG
  source 1..20: mol_type = other DNA
ggtgacagagcgagactctg

SEQ ID NO: 17140 - DNA, 20 bp, synthetic construct
  misc_feature 1..20: note = Description of Artificial Sequence: Synthetic oligonucleotide
  misc_feature 1..20: note = Target: ANGPTL4; (+) strand; PAM type: YTN; PAM sequence: CTC
  source 1..20: mol_type = other DNA
tgtctgaaaaaataaaaaat

SEQ ID NO: 17141 - DNA, 20 bp, synthetic construct
  misc_feature 1..20: note = Description of Artificial Sequence: Synthetic oligonucleotide
  misc_feature 1..20: note = Target: ANGPTL4; (+) strand; PAM type: YTN; PAM sequence: CTG
  source 1..20: mol_type = other DNA
tctgaaaaaataaaaaataa

SEQ ID NO: 17142 - DNA, 20 bp, synthetic construct
  misc_feature 1..20: note = Description of Artificial Sequence: Synthetic oligonucleotide
  misc_feature 1..20: note = Target: ANGPTL4; (+) strand; PAM type: YTN; PAM sequence: CTG
  source 1..20: mol_type = other DNA
aaaaaataaaaaataagcca

SEQ ID NO: 17143 - DNA, 20 bp, synthetic construct
  misc_feature 1..20: note = Description of Artificial Sequence: Synthetic oligonucleotide
  misc_feature 1..20: note = Target: ANGPTL4; (+) strand; PAM type: YTN; PAM sequence: CTG
  source 1..20: mol_type = other DNA
catgactgtagtcccagcta

SEQ ID NO: 17144 - DNA, 20 bp, synthetic construct
  misc_feature 1..20: note = Description of Artificial Sequence: Synthetic oligonucleotide
  misc_feature 1..20: note = Target: ANGPTL4; (+) strand; PAM type: YTN; PAM sequence: CTG
  source 1..20: mol_type = other DNA
tagtcccagctacacaggag

SEQ ID NO: 17145 - DNA, 20 bp, synthetic construct
  misc_feature 1..20: note = Description of Artificial Sequence: Synthetic oligonucleotide
  misc_feature 1..20: note = Target: ANGPTL4; (+) strand; PAM type: YTN; PAM sequence: CTA
  source 1..20: mol_type = other DNA
cacaggaggctgaaaacagg

SEQ ID NO: 17146 - DNA, 20 bp, synthetic construct
  misc_feature 1..20: note = Description of Artificial Sequence: Synthetic oligonucleotide
  misc_feature 1..20: note = Target: ANGPTL4; (+) strand; PAM type: YTN; PAM sequence: CTG
  source 1..20: mol_type = other DNA
aaaacaggaggatcgcctga

SEQ ID NO: 17147 - DNA, 20 bp, synthetic construct
  misc_feature 1..20: note = Description of Artificial Sequence: Synthetic oligonucleotide
  misc_feature 1..20: note = Target: ANGPTL4; (+) strand; PAM type: YTN; PAM sequence: CTG
  source 1..20: mol_type = other DNA
accccaggagttggaggctg

SEQ ID NO: 17148 - DNA, 20 bp, synthetic construct
  misc_feature 1..20: note = Description of Artificial Sequence: Synthetic oligonucleotide
  misc_feature 1..20: note = Target: ANGPTL4; (+) strand; PAM type: YTN; PAM sequence: TTG
  source 1..20: mol_type = other DNA
gaggctgcagtgagctgtga

SEQ ID NO: 17149 - DNA, 20 bp, synthetic construct
  misc_feature 1..20: note = Description of Artificial Sequence: Synthetic oligonucleotide
  misc_feature 1..20: note = Target: ANGPTL4; (+) strand; PAM type: YTN; PAM sequence: CTG
  source 1..20: mol_type = other DNA
cagtgagctgtgacagcacc

SEQ ID NO: 17150 - DNA, 20 bp, synthetic construct
  misc_feature 1..20: note = Description of Artificial Sequence: Synthetic oligonucleotide
  misc_feature 1..20: note = Target: ANGPTL4; (+) strand; PAM type: YTN; PAM sequence: CTG
  source 1..20: mol_type = other DNA
tgacagcaccactgcactcc

SEQ ID NO: 17151 - DNA, 20 bp, synthetic construct
  misc_feature 1..20: note = Description of Artificial Sequence: Synthetic oligonucleotide
  misc_feature 1..20: note = Target: ANGPTL4; (+) strand; PAM type: YTN; PAM sequence: CTG
  source 1..20: mol_type = other DNA
cactccagcctgggcgagag

SEQ ID NO: 17152 - DNA, 20 bp, synthetic construct
  misc_feature 1..20: note = Description of Artificial Sequence: Synthetic oligonucleotide
  misc_feature 1..20: note = Target: ANGPTL4; (+) strand; PAM type: YTN; PAM sequence: CTC
  source 1..20: mol_type = other DNA
cagcctgggcgagagaacga

SEQ ID NO: 17153 - DNA, 20 bp, synthetic construct
  misc_feature 1..20: note = Description of Artificial Sequence: Synthetic oligonucleotide
  misc_feature 1..20: note = Target: ANGPTL4; (+) strand; PAM type: YTN; PAM sequence: CTG
  source 1..20: mol_type = other DNA
ggcgagagaacgagaccccg

SEQ ID NO: 17154 - DNA, 20 bp, synthetic construct
  misc_feature 1..20: note = Description of Artificial Sequence: Synthetic oligonucleotide
  misc_feature 1..20: note = Target: ANGPTL4; (+) strand; PAM type: YTN; PAM sequence: TTG
  source 1..20: mol_type = other DNA
ggaaaaaaaagaaaaaagaa

SEQ ID NO: 17155 - DNA, 20 bp, synthetic construct
  misc_feature 1..20: note = Description of Artificial Sequence: Synthetic oligonucleotide
  misc_feature 1..20: note = Target: ANGPTL4; (+) strand; PAM type: YTN; PAM sequence: CTC
  source 1..20: mol_type = other DNA
ccttgcctggcctcagcgga

SEQ ID NO: 17156 - DNA, 20 bp, synthetic construct
  misc_feature 1..20: note = Description of Artificial Sequence: Synthetic oligonucleotide
  misc_feature 1..20: note = Target: ANGPTL4; (+) strand; PAM type: YTN; PAM sequence: CTT
  source 1..20: mol_type = other DNA
gcctggcctcagcggatgga

SEQ ID NO: 17157 - DNA, 20 bp, synthetic construct
  misc_feature 1..20: note = Description of Artificial Sequence: Synthetic oligonucleotide
  misc_feature 1..20: note = Target: ANGPTL4; (+) strand; PAM type: YTN; PAM sequence: TTG
  source 1..20: mol_type = other DNA
cctggcctcagcggatggag

SEQ ID NO: 17158 - DNA, 20 bp, synthetic construct
  misc_feature 1..20: note = Description of Artificial Sequence: Synthetic oligonucleotide
  misc_feature 1..20: note = Target: ANGPTL4; (+) strand; PAM type: YTN; PAM sequence: CTG
  source 1..20: mol_type = other DNA
gcctcagcggatggagattt

SEQ ID NO: 17159 - DNA, 20 bp, synthetic construct
  misc_feature 1..20: note = Description of Artificial Sequence: Synthetic oligonucleotide
  misc_feature 1..20: note = Target: ANGPTL4; (+) strand; PAM type: YTN; PAM sequence: CTC
  source 1..20: mol_type = other DNA
agcggatggagatttggaag

SEQ ID NO: 17160 - DNA, 20 bp, synthetic construct
  misc_feature 1..20: note = Description of Artificial Sequence: Synthetic oligonucleotide
  misc_feature 1..20: note = Target: ANGPTL4; (+) strand; PAM type: YTN; PAM sequence: TTT
  source 1..20: mol_type = other DNA
ggaaggatggatgagtggat

SEQ ID NO: 17161 - DNA, 20 bp, synthetic construct
  misc_feature 1..20: note = Description of Artificial Sequence: Synthetic oligonucleotide
  misc_feature 1..20: note = Target: ANGPTL4; (+) strand; PAM type: YTN; PAM sequence: TTG
  source 1..20: mol_type = other DNA
gaaggatggatgagtggatg

SEQ ID NO: 17162 - DNA, 20 bp, synthetic construct
  misc_feature 1..20: note = Description of Artificial Sequence: Synthetic oligonucleotide
  misc_feature 1..20: note = Target: ANGPTL4; (+) strand; PAM type: YTN; PAM sequence: TTA
  source 1..20: mol_type = other DNA
agaggttggggtaggcaagc

SEQ ID NO: 17163 - DNA, 20 bp, synthetic construct
  misc_feature 1..20: note = Description of Artificial Sequence: Synthetic oligonucleotide
  misc_feature 1..20: note = Target: ANGPTL4; (+) strand; PAM type: YTN; PAM sequence: TTG
  source 1..20: mol_type = other DNA
gggtaggcaagctgggtcct

SEQ ID NO: 17164 - DNA, 20 bp, synthetic construct
  misc_feature 1..20: note = Description of Artificial Sequence: Synthetic oligonucleotide
  misc_feature 1..20: note = Target: ANGPTL4; (+) strand; PAM type: YTN; PAM sequence: CTG
  source 1..20: mol_type = other DNA
ggtcctcaccaaggttttca

SEQ ID NO: 17165 - DNA, 20 bp, synthetic construct
  misc_feature 1..20: note = Description of Artificial Sequence: Synthetic oligonucleotide
  misc_feature 1..20: note = Target: ANGPTL4; (+) strand; PAM type: YTN; PAM sequence: CTC
  source 1..20: mol_type = other DNA
accaaggttttcacccctcc

SEQ ID NO: 17166 - DNA, 20 bp, synthetic construct
  misc_feature 1..20: note = Description of Artificial Sequence: Synthetic oligonucleotide
  misc_feature 1..20: note = Target: ANGPTL4; (+) strand; PAM type: YTN; PAM sequence: TTT
  source 1..20: mol_type = other DNA
tcacccctccccagacacaa

SEQ ID NO: 17167 - DNA, 20 bp, synthetic construct
  misc_feature 1..20: note = Description of Artificial Sequence: Synthetic oligonucleotide
  misc_feature 1..20: note = Target: ANGPTL4; (+) strand; PAM type: YTN; PAM sequence: TTT
  source 1..20: mol_type = other DNA
cacccctccccagacacaac

SEQ ID NO: 17168 - DNA, 20 bp, synthetic construct
  misc_feature 1..20: note = Description of Artificial Sequence: Synthetic oligonucleotide
  misc_feature 1..20: note = Target: ANGPTL4; (+) strand; PAM type: YTN; PAM sequence: TTC
  source 1..20: mol_type = other DNA
acccctccccagacacaact

SEQ ID NO: 17169 - DNA, 20 bp, synthetic construct
  misc_feature 1..20: note = Description of Artificial Sequence: Synthetic oligonucleotide
  misc_feature 1..20: note = Target: ANGPTL4; (+) strand; PAM type: YTN; PAM sequence: CTC
  source 1..20: mol_type = other DNA
cccagacacaactcaaggct

SEQ ID NO: 17170 - DNA, 20 bp, synthetic construct
  misc_feature 1..20: note = Description of Artificial Sequence: Synthetic oligonucleotide
  misc_feature 1..20: note = Target: ANGPTL4; (+) strand; PAM type: YTN; PAM sequence: CTC
  source 1..20: mol_type = other DNA
aaggctcagaacagcaggat

SEQ ID NO: 17171 - DNA, 20 bp, synthetic construct
  misc_feature 1..20: note = Description of Artificial Sequence: Synthetic oligonucleotide
  misc_feature 1..20: note = Target: ANGPTL4; (+) strand; PAM type: YTN; PAM sequence: CTC
  source 1..20: mol_type = other DNA
agaacagcaggatccagcaa

SEQ ID NO: 17172 - DNA, 20 bp, synthetic construct
  misc_feature 1..20: note = Description of Artificial Sequence: Synthetic oligonucleotide
  misc_feature 1..20: note = Target: ANGPTL4; (+) strand; PAM type: YTN; PAM sequence: CTC
  source 1..20: mol_type = other DNA
ttccacaaggtggcccagca

SEQ ID NO: 17173 - DNA, 20 bp, synthetic construct
  misc_feature 1..20: note = Description of Artificial Sequence: Synthetic oligonucleotide
  misc_feature 1..20: note = Target: ANGPTL4; (+) strand; PAM type: YTN; PAM sequence: CTT
  source 1..20: mol_type = other DNA
ccacaaggtggcccagcagc

SEQ ID NO: 17174 - DNA, 20 bp, synthetic construct
  misc_feature 1..20: note = Description of Artificial Sequence: Synthetic oligonucleotide
  misc_feature 1..20: note = Target: ANGPTL4; (+) strand; PAM type: YTN; PAM sequence: TTC
  source 1..20: mol_type = other DNA
cacaaggtggcccagcagca

SEQ ID NO: 17175 - DNA, 20 bp, synthetic construct
  misc_feature 1..20: note = Description of Artificial Sequence: Synthetic oligonucleotide
  misc_feature 1..20: note = Target: ANGPTL4; (+) strand; PAM type: YTN; PAM sequence: CTG
  source 1..20: mol_type = other DNA
gagaagcagcacctgcgaat

SEQ ID NO: 17176 - DNA, 20 bp, synthetic construct
  misc_feature 1..20: note = Description of Artificial Sequence: Synthetic oligonucleotide
  misc_feature 1..20: note = Target: ANGPTL4; (+) strand; PAM type: YTN; PAM sequence: CTG
  source 1..20: mol_type = other DNA
cgaattcagcatctgcaaag

SEQ ID NO: 17177 - DNA, 20 bp, synthetic construct
  misc_feature 1..20: note = Description of Artificial Sequence: Synthetic oligonucleotide
  misc_feature 1..20: note = Target: ANGPTL4; (+) strand; PAM type: YTN; PAM sequence: TTC
  source 1..20: mol_type = other DNA
agcatctgcaaagccaggta

SEQ ID NO: 17178 - DNA, 20 bp, synthetic construct
  misc_feature 1..20: note = Description of Artificial Sequence: Synthetic oligonucleotide
  misc_feature 1..20: note = Target: ANGPTL4; (+) strand; PAM type: YTN; PAM sequence: CTG
  source 1..20: mol_type = other DNA
caaagccaggtaaccctagg

SEQ ID NO: 17179 - DNA, 20 bp, synthetic construct
  misc_feature 1..20: note = Description of Artificial Sequence: Synthetic oligonucleotide
  misc_feature 1..20: note = Target: ANGPTL4; (+) strand; PAM type: YTN; PAM sequence: CTA
  source 1..20: mol_type = other DNA
ggatcaagggagaaaaggtc

SEQ ID NO: 17180 - DNA, 20 bp, synthetic construct
  misc_feature 1..20: note = Description of Artificial Sequence: Synthetic oligonucleotide
  misc_feature 1..20: note = Target: ANGPTL4; (+) strand; PAM type: YTN; PAM sequence: CTC
  source 1..20: mol_type = other DNA
tgatagctggaccccaggtt

SEQ ID NO: 17181 - DNA, 20 bp, synthetic construct
  misc_feature 1..20: note = Description of Artificial Sequence: Synthetic oligonucleotide
  misc_feature 1..20: note = Target: ANGPTL4; (+) strand; PAM type: YTN; PAM sequence: CTG
  source 1..20: mol_type = other DNA
atagctggaccccaggttga

SEQ ID NO: 17182 - DNA, 20 bp, synthetic construct
  misc_feature 1..20: note = Description of Artificial Sequence: Synthetic oligonucleotide
  misc_feature 1..20: note = Target: ANGPTL4; (+) strand; PAM type: YTN; PAM sequence: CTG
  source 1..20: mol_type = other DNA
gaccccaggttgagagggag

SEQ ID NO: 17183 - DNA, 20 bp, synthetic construct
  misc_feature 1..20: note = Description of Artificial Sequence: Synthetic oligonucleotide
  misc_feature 1..20: note = Target: ANGPTL4; (+) strand; PAM type: YTN; PAM sequence: TTG
  source 1..20: mol_type = other DNA
agagggaggtggtgagaact

SEQ ID NO: 17184 - DNA, 20 bp, synthetic construct
  misc_feature 1..20: note = Description of Artificial Sequence: Synthetic oligonucleotide
  misc_feature 1..20: note = Target: ANGPTL4; (+) strand; PAM type: YTN; PAM sequence: CTG
  source 1..20: mol_type = other DNA
gacgtgtggctggggacgtg

SEQ ID NO: 17185 - DNA, 20 bp, synthetic construct
  misc_feature 1..20: note = Description of Artificial Sequence: Synthetic oligonucleotide
  misc_feature 1..20: note = Target: ANGPTL4; (+) strand; PAM type: YTN; PAM sequence: CTG
  source 1..20: mol_type = other DNA
gggacgtggggccaggcagg

SEQ ID NO: 17186 - DNA, 20 bp, synthetic construct
  misc_feature 1..20: note = Description of Artificial Sequence: Synthetic oligonucleotide
  misc_feature 1..20: note = Target: ANGPTL4; (+) strand; PAM type: YTN; PAM sequence: CTG
  source 1..20: mol_type = other DNA
acaccctcctcccgtcccat

SEQ ID NO: 17187 - DNA, 20 bp, synthetic construct
  misc_feature 1..20: note = Description of Artificial Sequence: Synthetic oligonucleotide
  misc_feature 1..20: note = Target: ANGPTL4; (+) strand; PAM type: YTN; PAM sequence: CTC
  source 1..20: mol_type = other DNA
ctcccgtcccatcctagttt

SEQ ID NO: 17188 - DNA, 20 bp, synthetic construct
  misc_feature 1..20: note = Description of Artificial Sequence: Synthetic oligonucleotide
  misc_feature 1..20: note = Target: ANGPTL4; (+) strand; PAM type: YTN; PAM sequence: CTC
  source 1..20: mol_type = other DNA
ccgtcccatcctagtttggc

SEQ ID NO: 17189 - DNA, 20 bp, synthetic construct
  misc_feature 1..20: note = Description of Artificial Sequence: Synthetic oligonucleotide
  misc_feature 1..20: note = Target: ANGPTL4; (+) strand; PAM type: YTN; PAM sequence: CTA
  source 1..20: mol_type = other DNA
gtttggcctcctggaccaca

SEQ ID NO: 17190 - DNA, 20 bp, synthetic construct
  misc_feature 1..20: note = Description of Artificial Sequence: Synthetic oligonucleotide
  misc_feature 1..20: note = Target: ANGPTL4; (+) strand; PAM type: YTN; PAM sequence: TTT
  source 1..20: mol_type = other DNA
ggcctcctggaccacaagca

SEQ ID NO: 17191 - DNA, 20 bp, synthetic construct
  misc_feature 1..20: note = Description of Artificial Sequence: Synthetic oligonucleotide
  misc_feature 1..20: note = Target: ANGPTL4; (+) strand; PAM type: YTN; PAM sequence: TTG
  source 1..20: mol_type = other DNA
gcctcctggaccacaagcac

SEQ ID NO: 17192 - DNA, 20 bp, synthetic construct
  misc_feature 1..20: note = Description of Artificial Sequence: Synthetic oligonucleotide
  misc_feature 1..20: note = Target: ANGPTL4; (+) strand; PAM type: YTN; PAM sequence: CTC
  source 1..20: mol_type = other DNA
ctggaccacaagcacctaga

SEQ ID NO: 17193 - DNA, 20 bp, synthetic construct
  misc_feature 1..20: note = Description of Artificial Sequence: Synthetic oligonucleotide
  misc_feature 1..20: note = Target: ANGPTL4; (+) strand; PAM type: YTN; PAM sequence: CTG
  source 1..20: mol_type = other DNA
gaccacaagcacctagacca

SEQ ID NO: 17194 - DNA, 20 bp, synthetic construct
  misc_feature 1..20: note = Description of Artificial Sequence: Synthetic oligonucleotide
  misc_feature 1..20: note = Target: ANGPTL4; (+) strand; PAM type: YTN; PAM sequence: CTA
  source 1..20: mol_type = other DNA
gaccatgaggtggccaagcc

SEQ ID NO: 17195 - DNA, 20 bp, synthetic construct
  misc_feature 1..20: note = Description of Artificial Sequence: Synthetic oligonucleotide
  misc_feature 1..20: note = Target: ANGPTL4; (+) strand; PAM type: YTN; PAM sequence: CTG
  source 1..20: mol_type = other DNA
cccgaagaaagaggctgccc

SEQ ID NO: 17196 - DNA, 20 bp, synthetic construct
  misc_feature 1..20: note = Description of Artificial Sequence: Synthetic oligonucleotide
  misc_feature 1..20: note = Target: ANGPTL4; (+) strand; PAM type: YTN; PAM sequence: CTG
  source 1..20: mol_type = other DNA
cccgagatggcccagccagt

SEQ ID NO: 17197 - DNA, 20 bp, synthetic construct
  misc_feature 1..20: note = Description of Artificial Sequence: Synthetic oligonucleotide
  misc_feature 1..20: note = Target: ANGPTL4; (+) strand; PAM type: YTN; PAM sequence: TTG
  source 1..20: mol_type = other DNA
acccggctcacaatgtcagc

SEQ ID NO: 17198 - DNA, 20 bp, synthetic construct
  misc_feature 1..20: note = Description of Artificial Sequence: Synthetic oligonucleotide
  misc_feature 1..20: note = Target: ANGPTL4; (+) strand; PAM type: YTN; PAM sequence: CTC
  source 1..20: mol_type = other DNA
acaatgtcagccgcctgcac

SEQ ID NO: 17199 - DNA, 20 bp, synthetic construct
  misc_feature 1..20: note = Description of Artificial Sequence: Synthetic oligonucleotide
  misc_feature 1..20: note = Target: ANGPTL4; (+) strand; PAM type: YTN; PAM sequence: CTG
  source 1..20: mol_type = other DNA
caccgtgagtgtctgcccct

SEQ ID NO: 17200 - DNA, 20 bp, synthetic construct
  misc_feature 1..20: note = Description of Artificial Sequence: Synthetic oligonucleotide
  misc_feature 1..20: note = Target: ANGPTL4; (+) strand; PAM type: YTN; PAM sequence: CTG
  source 1..20: mol_type = other DNA
cccctcgatgctctccggtg

SEQ ID NO: 17201 - DNA, 20 bp, synthetic construct
  misc_feature 1..20: note = Description of Artificial Sequence: Synthetic oligonucleotide
  misc_feature 1..20: note = Target: ANGPTL4; (+) strand; PAM type: YTN; PAM sequence: CTC
  source 1..20: mol_type = other DNA
gatgctctccggtggccacc

SEQ ID NO: 17202 - DNA, 20 bp, synthetic construct
  misc_feature 1..20: note = Description of Artificial Sequence: Synthetic oligonucleotide
  misc_feature 1..20: note = Target: ANGPTL4; (+) strand; PAM type: YTN; PAM sequence: CTC
  source 1..20: mol_type = other DNA
tccggtggccacccctaccc

SEQ ID NO: 17203 - DNA, 20 bp, synthetic construct
  misc_feature 1..20: note = Description of Artificial Sequence: Synthetic oligonucleotide
  misc_feature 1..20: note = Target: ANGPTL4; (+) strand; PAM type: YTN; PAM sequence: CTC
  source 1..20: mol_type = other DNA
cggtggccacccctaccccg

SEQ ID NO: 17204 - DNA, 20 bp, synthetic construct
  misc_feature 1..20: note = Description of Artificial Sequence: Synthetic oligonucleotide
  misc_feature 1..20: note = Target: ANGPTL4; (+) strand; PAM type: YTN; PAM sequence: CTA
  source 1..20: mol_type = other DNA
ccccgccacttgccattgct

SEQ ID NO: 17205 - DNA, 20 bp, synthetic construct
  misc_feature 1..20: note = Description of Artificial Sequence: Synthetic oligonucleotide
  misc_feature 1..20: note = Target: ANGPTL4; (+) strand; PAM type: YTN; PAM sequence: CTT
  source 1..20: mol_type = other DNA
gccattgctggtcctctcct

SEQ ID NO: 17206 - DNA, 20 bp, synthetic construct
  misc_feature 1..20: note = Description of Artificial Sequence: Synthetic oligonucleotide
  misc_feature 1..20: note = Target: ANGPTL4; (+) strand; PAM type: YTN; PAM sequence: TTG
  source 1..20: mol_type = other DNA
ccattgctggtcctctcctt

SEQ ID NO: 17207 - DNA, 20 bp, synthetic construct
  misc_feature 1..20: note = Description of Artificial Sequence: Synthetic oligonucleotide
  misc_feature 1..20: note = Target: ANGPTL4; (+) strand; PAM type: YTN; PAM sequence: TTG
  source 1..20: mol_type = other DNA
ctggtcctctccttgtcagg

SEQ ID NO: 17208 - DNA, 20 bp, synthetic construct
  misc_feature 1..20: note = Description of Artificial Sequence: Synthetic oligonucleotide
  misc_feature 1..20: note = Target: ANGPTL4; (+) strand; PAM type: YTN; PAM sequence: CTG
  source 1..20: mol_type = other DNA
gtcctctccttgtcaggtcc

SEQ ID NO: 17209 - DNA, 20 bp, synthetic construct
  misc_feature 1..20: note = Description of Artificial Sequence: Synthetic oligonucleotide
  misc_feature 1..20: note = Target: ANGPTL4; (+) strand; PAM type: YTN; PAM sequence: CTC
  source 1..20: mol_type = other DNA
tccttgtcaggtccacctta

SEQ ID NO: 17210 - DNA, 20 bp, synthetic construct
  misc_feature 1..20: note = Description of Artificial Sequence: Synthetic oligonucleotide
  misc_feature 1..20: note = Target: ANGPTL4; (+) strand; PAM type: YTN; PAM sequence: CTC
  source 1..20: mol_type = other DNA
cttgtcaggtccaccttaag

SEQ ID NO: 17211 - DNA, 20 bp, synthetic construct
  misc_feature 1..20: note = Description of Artificial Sequence: Synthetic oligonucleotide
  misc_feature 1..20: note = Target: ANGPTL4; (+) strand; PAM type: YTN; PAM sequence: CTT
  source 1..20: mol_type = other DNA
gtcaggtccaccttaaggag

SEQ ID NO: 17212 - DNA, 20 bp, synthetic construct
  misc_feature 1..20: note = Description of Artificial Sequence: Synthetic oligonucleotide
  misc_feature 1..20: note = Target: ANGPTL4; (+) strand; PAM type: YTN; PAM sequence: TTG
  source 1..20: mol_type = other DNA
tcaggtccaccttaaggaga

SEQ ID NO: 17213 - DNA, 20 bp, synthetic construct
  misc_feature 1..20: note = Description of Artificial Sequence: Synthetic oligonucleotide
  misc_feature 1..20: note = Target: ANGPTL4; (+) strand; PAM type: YTN; PAM sequence: CTT
  source 1..20: mol_type = other DNA
aaggagaagatgtcctggcc

SEQ ID NO: 17214 - DNA, 20 bp, synthetic construct
  misc_feature 1..20: note = Description of Artificial Sequence: Synthetic oligonucleotide
  misc_feature 1..20: note = Target: ANGPTL4; (+) strand; PAM type: YTN; PAM sequence: TTA
  source 1..20: mol_type = other DNA
aggagaagatgtcctggcct

SEQ ID NO: 17215 - DNA, 20 bp, synthetic construct
  misc_feature 1..20: note = Description of Artificial Sequence: Synthetic oligonucleotide
  misc_feature 1..20: note = Target: ANGPTL4; (+) strand; PAM type: YTN; PAM sequence: CTG
  source 1..20: mol_type = other DNA
gcctggagtccctgagggct

SEQ ID NO: 17216 - DNA, 20 bp, synthetic construct
  misc_feature 1..20: note = Description of Artificial Sequence: Synthetic oligonucleotide
  misc_feature 1..20: note = Target: ANGPTL4; (+) strand; PAM type: YTN; PAM sequence: CTG
  source 1..20: mol_type = other DNA
gagtccctgagggctcacca

SEQ ID NO: 17217 - DNA, 20 bp, synthetic construct
  misc_feature 1..20: note = Description of Artificial Sequence: Synthetic oligonucleotide
  misc_feature 1..20: note = Target: ANGPTL4; (+) strand; PAM type: YTN; PAM sequence: CTG
  source 1..20: mol_type = other DNA
agggctcaccagtctctggg

SEQ ID NO: 17218 - DNA, 20 bp, synthetic construct
  misc_feature 1..20: note = Description of Artificial Sequence: Synthetic oligonucleotide
  misc_feature 1..20: note = Target: ANGPTL4; (+) strand; PAM type: YTN; PAM sequence: CTC
  source 1..20: mol_type = other DNA
accagtctctgggtcaaagc

SEQ ID NO: 17219 - DNA, 20 bp, synthetic construct
  misc_feature 1..20: note = Description of Artificial Sequence: Synthetic oligonucleotide
  misc_feature 1..20: note = Target: ANGPTL4; (+) strand; PAM type: YTN; PAM sequence: CTC
  source 1..20: mol_type = other DNA
tgggtcaaagctgatgggag

SEQ ID NO: 17220 - DNA, 20 bp, synthetic construct
  misc_feature 1..20: note = Description of Artificial Sequence: Synthetic oligonucleotide
  misc_feature 1..20: note = Target: ANGPTL4; (+) strand; PAM type: YTN; PAM sequence: CTG
  source 1..20: mol_type = other DNA
ggtcaaagctgatgggagca

SEQ ID NO: 17221 - DNA, 20 bp, synthetic construct
  misc_feature 1..20: note = Description of Artificial Sequence: Synthetic oligonucleotide
  misc_feature 1..20: note = Target: ANGPTL4; (+) strand; PAM type: YTN; PAM sequence: CTG
  source 1..20: mol_type = other DNA
atgggagcacctccttcctc

SEQ ID NO: 17222 - DNA, 20 bp, synthetic construct
  misc_feature 1..20: note = Description of Artificial Sequence: Synthetic oligonucleotide
  misc_feature 1..20: note = Target: ANGPTL4; (+) strand; PAM type: YTN; PAM sequence: CTC
  source 1..20: mol_type = other DNA
cttcctcagccctgacctgg

SEQ ID NO: 17223 - DNA, 20 bp, synthetic construct
  misc_feature 1..20: note = Description of Artificial Sequence: Synthetic oligonucleotide
  misc_feature 1..20: note = Target: ANGPTL4; (+) strand; PAM type: YTN; PAM sequence: CTT
  source 1..20: mol_type = other DNA
cctcagccctgacctggccc

SEQ ID NO: 17224 - DNA, 20 bp, synthetic construct
  misc_feature 1..20: note = Description of Artificial Sequence: Synthetic oligonucleotide
  misc_feature 1..20: note = Target: ANGPTL4; (+) strand; PAM type: YTN; PAM sequence: TTC
  source 1..20: mol_type = other DNA
ctcagccctgacctggccca

SEQ ID NO: 17225 - DNA, 20 bp, synthetic construct
  misc_feature 1..20: note = Description of Artificial Sequence: Synthetic oligonucleotide
  misc_feature 1..20: note = Target: ANGPTL4; (+) strand; PAM type: YTN; PAM sequence: CTC
  source 1..20: mol_type = other DNA
agccctgacctggcccagcc

SEQ ID NO: 17226 - DNA, 20 bp, synthetic construct
  misc_feature 1..20: note = Description of Artificial Sequence: Synthetic oligonucleotide
  misc_feature 1..20: note = Target: ANGPTL4; (+) strand; PAM type: YTN; PAM sequence: CTG
  source 1..20: mol_type = other DNA
acctggcccagccaggccac

SEQ ID NO: 17227 - DNA, 20 bp, synthetic construct
  misc_feature 1..20: note = Description of Artificial Sequence: Synthetic oligonucleotide
  misc_feature 1..20: note = Target: ANGPTL4; (+) strand; PAM type: YTN; PAM sequence: CTG
  source 1..20: mol_type = other DNA
gcccagccaggccacccaac

SEQ ID NO: 17228 - DNA, 20 bp, synthetic construct
  misc_feature 1..20: note = Description of Artificial Sequence: Synthetic oligonucleotide
  misc_feature 1..20: note = Target: ANGPTL4; (+) strand; PAM type: YTN; PAM sequence: CTT
  source 1..20: mol_type = other DNA
ctcctctgcaagccagtggg

SEQ ID NO: 17229 - DNA, 20 bp, synthetic construct
  misc_feature 1..20: note = Description of Artificial Sequence: Synthetic oligonucleotide
  misc_feature 1..20: note = Target: ANGPTL4; (+) strand; PAM type: YTN; PAM sequence: TTC
  source 1..20: mol_type = other DNA
tcctctgcaagccagtgggc

SEQ ID NO: 17230 - DNA, 20 bp, synthetic construct
  misc_feature 1..20: note = Description of Artificial Sequence: Synthetic oligonucleotide
  misc_feature 1..20: note = Target: ANGPTL4; (+) strand; PAM type: YTN; PAM sequence: CTC
  source 1..20: mol_type = other DNA
ctctgcaagccagtgggctg

SEQ ID NO: 17231 - DNA, 20 bp, synthetic construct
  misc_feature 1..20: note = Description of Artificial Sequence: Synthetic oligonucleotide
  misc_feature 1..20: note = Target: ANGPTL4; (+) strand; PAM type: YTN; PAM sequence: CTC
  source 1..20: mol_type = other DNA
tgcaagccagtgggctgtcc

SEQ ID NO: 17232 - DNA, 20 bp, synthetic construct
  misc_feature 1..20: note = Description of Artificial Sequence: Synthetic oligonucleotide
  misc_feature 1..20: note = Target: ANGPTL4; (+) strand; PAM type: YTN; PAM sequence: CTG
  source 1..20: mol_type = other DNA
caagccagtgggctgtccct

SEQ ID NO: 17233 - DNA, 20 bp, synthetic construct
  misc_feature 1..20: note = Description of Artificial Sequence: Synthetic oligonucleotide
  misc_feature 1..20: note = Target: ANGPTL4; (+) strand; PAM type: YTN; PAM sequence: CTG
  source 1..20: mol_type = other DNA
tccctgaagccctgctgatc

SEQ ID NO: 17234 - DNA, 20 bp, synthetic construct
  misc_feature 1..20: note = Description of Artificial Sequence: Synthetic oligonucleotide
  misc_feature 1..20: note = Target: ANGPTL4; (+) strand; PAM type: YTN; PAM sequence: CTG
  source 1..20: mol_type = other DNA
aagccctgctgatcactgat

SEQ ID NO: 17235 - DNA, 20 bp, synthetic construct
  misc_feature 1..20: note = Description of Artificial Sequence: Synthetic oligonucleotide
  misc_feature 1..20: note = Target: ANGPTL4; (+) strand; PAM type: YTN; PAM sequence: CTG
  source 1..20: mol_type = other DNA
ctgatcactgattggaacag

SEQ ID NO: 17236 - DNA, 20 bp, synthetic construct
  misc_feature 1..20: note = Description of Artificial Sequence: Synthetic oligonucleotide
  misc_feature 1..20: note = Target: ANGPTL4; (+) strand; PAM type: YTN; PAM sequence: CTG
  source 1..20: mol_type = other DNA
atcactgattggaacagagg

SEQ ID NO: 17237 - DNA, 20 bp, synthetic construct
  misc_feature 1..20: note = Description of Artificial Sequence: Synthetic oligonucleotide
  misc_feature 1..20: note = Target: ANGPTL4; (+) strand; PAM type: YTN; PAM sequence: CTG
  source 1..20: mol_type = other DNA
attggaacagaggtggagaa

SEQ ID NO: 17238 - DNA, 20 bp, synthetic construct
  misc_feature 1..20: note = Description of Artificial Sequence: Synthetic oligonucleotide
  misc_feature 1..20: note = Target: ANGPTL4; (+) strand; PAM type: YTN; PAM sequence: TTG
  source 1..20: mol_type = other DNA
gaacagaggtggagaaagag

SEQ ID NO: 17239 - DNA, 20 bp, synthetic construct
  misc_feature 1..20: note = Description of Artificial Sequence: Synthetic oligonucleotide
  misc_feature 1..20: note = Target: ANGPTL4; (+) strand; PAM type: YTN; PAM sequence: CTT
  source 1..20: mol_type = other DNA
gagggacttgagctgcaggg

SEQ ID NO: 17240 - DNA, 20 bp, synthetic construct
  misc_feature 1..20: note = Description of Artificial Sequence: Synthetic oligonucleotide
  misc_feature 1..20: note = Target: ANGPTL4; (+) strand; PAM type: YTN; PAM sequence: TTG
  source 1..20: mol_type = other DNA
agggacttgagctgcagggg

SEQ ID NO: 17241 - DNA, 20 bp, synthetic construct
  misc_feature 1..20: note = Description of Artificial Sequence: Synthetic oligonucleotide
  misc_feature 1..20: note = Target: ANGPTL4; (+) strand; PAM type: YTN; PAM sequence: CTT
  source 1..20: mol_type = other DNA
gagctgcaggggtgctggag

SEQ ID NO: 17242 - DNA, 20 bp, synthetic construct
  misc_feature 1..20: note = Description of Artificial Sequence: Synthetic oligonucleotide
  misc_feature 1..20: note = Target: ANGPTL4; (+) strand; PAM type: YTN; PAM sequence: TTG
  source 1..20: mol_type = other DNA
agctgcaggggtgctggaga

SEQ ID NO: 17243 - DNA, 20 bp, synthetic construct
  misc_feature 1..20: note = Description of Artificial Sequence: Synthetic oligonucleotide
  misc_feature 1..20: note = Target: ANGPTL4; (+) strand; PAM type: YTN; PAM sequence: CTG
  source 1..20: mol_type = other DNA
caggggtgctggagaaggta

SEQ ID NO: 17244 - DNA, 20 bp, synthetic construct
  misc_feature 1..20: note = Description of Artificial Sequence: Synthetic oligonucleotide
  misc_feature 1..20: note = Target: ANGPTL4; (+) strand; PAM type: YTN; PAM sequence: CTG
  source 1..20: mol_type = other DNA
gagaaggtagaaatggggtt

SEQ ID NO: 17245 - DNA, 20 bp, synthetic construct
  misc_feature 1..20: note = Description of Artificial Sequence: Synthetic oligonucleotide
  misc_feature 1..20: note = Target: ANGPTL4; (+) strand; PAM type: YTN; PAM sequence: TTC
  source 1..20: mol_type = other DNA
ggggtgccatcctgaaggtt

SEQ ID NO: 17246 - DNA, 20 bp, synthetic construct
  misc_feature 1..20: note = Description of Artificial Sequence: Synthetic oligonucleotide
  misc_feature 1..20: note = Target: ANGPTL4; (+) strand; PAM type: YTN; PAM sequence: CTG
  source 1..20: mol_type = other DNA
aaggttagaaccttctaggg

SEQ ID NO: 17247 - DNA, 20 bp, synthetic construct
  misc_feature 1..20: note = Description of Artificial Sequence: Synthetic oligonucleotide
  misc_feature 1..20: note = Target: ANGPTL4; (+) strand; PAM type: YTN; PAM sequence: TTA
  source 1..20: mol_type = other DNA
gaaccttctaggggagggtg

SEQ ID NO: 17248 - DNA, 20 bp, synthetic construct
  misc_feature 1..20: note = Description of Artificial Sequence: Synthetic oligonucleotide
  misc_feature 1..20: note = Target: ANGPTL4; (+) strand; PAM type: YTN; PAM sequence: CTT
  source 1..20: mol_type = other DNA
ctaggggagggtgtcatgga

SEQ ID NO: 17249 - DNA, 20 bp, synthetic construct
  misc_feature 1..20: note = Description of Artificial Sequence: Synthetic oligonucleotide
  misc_feature 1..20: note = Target: ANGPTL4; (+) strand; PAM type: YTN; PAM sequence: TTC
  source 1..20: mol_type = other DNA
taggggagggtgtcatggag

SEQ ID NO: 17250 - DNA, 20 bp, synthetic construct
  misc_feature 1..20: note = Description of Artificial Sequence: Synthetic oligonucleotide
  misc_feature 1..20: note = Target: ANGPTL4; (+) strand; PAM type: YTN; PAM sequence: CTA
  source 1..20: mol_type = other DNA
ggggagggtgtcatggagga

SEQ ID NO: 17251 - DNA, 20 bp, synthetic construct
  misc_feature 1..20: note = Description of Artificial Sequence: Synthetic oligonucleotide
  misc_feature 1..20: note = Target: ANGPTL4; (+) strand; PAM type: YTN; PAM sequence: TTT
  source 1..20: mol_type = other DNA
gtagatttgggccctccaca

SEQ ID NO: 17252 - DNA, 20 bp, synthetic construct
  misc_feature 1..20: note = Description of Artificial Sequence: Synthetic oligonucleotide
  misc_feature 1..20: note = Target: ANGPTL4; (+) strand; PAM type: YTN; PAM sequence: TTG
  source 1..20: mol_type = other DNA
tagatttgggccctccacaa

SEQ ID NO: 17253 - DNA, 20 bp, synthetic construct
  misc_feature 1..20: note = Description of Artificial Sequence: Synthetic oligonucleotide
  misc_feature 1..20: note = Target: ANGPTL4; (+) strand; PAM type: YTN; PAM sequence: TTT
  source 1..20: mol_type = other DNA
gggccctccacaatgtcttg

SEQ ID NO: 17254 - DNA, 20 bp, synthetic construct
  misc_feature 1..20: note = Description of Artificial Sequence: Synthetic oligonucleotide
  misc_feature 1..20: note = Target: ANGPTL4; (+) strand; PAM type: YTN; PAM sequence: TTG
  source 1..20: mol_type = other DNA
ggccctccacaatgtcttgg

SEQ ID NO: 17255 - DNA, 20 bp, synthetic construct
  misc_feature 1..20: note = Description of Artificial Sequence: Synthetic oligonucleotide
  misc_feature 1..20: note = Target: ANGPTL4; (+) strand; PAM type: YTN; PAM sequence: CTC
  source 1..20: mol_type = other DNA
cacaatgtcttggggtatgt

SEQ ID NO: 17256 - DNA, 20 bp, synthetic construct
  misc_feature 1..20: note = Description of Artificial Sequence: Synthetic oligonucleotide
  misc_feature 1..20: note = Target: ANGPTL4; (+) strand; PAM type: YTN; PAM sequence: CTT
  source 1..20: mol_type = other DNA
ggggtatgtgggaattaggg

SEQ ID NO: 17257 - DNA, 20 bp, synthetic construct
  misc_feature 1..20: note = Description of Artificial Sequence: Synthetic oligonucleotide
  misc_feature 1..20: note = Target: ANGPTL4; (+) strand; PAM type: YTN; PAM sequence: TTG
  source 1..20: mol_type = other DNA
gggtatgtgggaattagggc

SEQ ID NO: 17258 - DNA, 20 bp, synthetic construct
  misc_feature 1..20: note = Description of Artificial Sequence: Synthetic oligonucleotide
  misc_feature 1..20: note = Target: ANGPTL4; (+) strand; PAM type: YTN; PAM sequence: TTA
  source 1..20: mol_type = other DNA
gggctgggaacccccagctc

SEQ ID NO: 17259 - DNA, 20 bp, synthetic construct
  misc_feature 1..20: note = Description of Artificial Sequence: Synthetic oligonucleotide
  misc_feature 1..20: note = Target: ANGPTL4; (+) strand; PAM type: YTN; PAM sequence: CTG
  source 1..20: mol_type = other DNA
ggaacccccagctcccagac

SEQ ID NO: 17260 - DNA, 20 bp, synthetic construct
  misc_feature 1..20: note = Description of Artificial Sequence: Synthetic oligonucleotide
  misc_feature 1..20: note = Target: ANGPTL4; (+) strand; PAM type: YTN; PAM sequence: CTC
  source 1..20: mol_type = other DNA
ccagaccagaaacactcttg

SEQ ID NO: 17261 - DNA, 20 bp, synthetic construct
  misc_feature 1..20: note = Description of Artificial Sequence: Synthetic oligonucleotide
  misc_feature 1..20: note = Target: ANGPTL4; (+) strand; PAM type: YTN; PAM sequence: CTC
  source 1..20: mol_type = other DNA
ttgtatcttacaaatccaat

SEQ ID NO: 17262 - DNA, 20 bp, synthetic construct
  misc_feature 1..20: note = Description of Artificial Sequence: Synthetic oligonucleotide
  misc_feature 1..20: note = Target: ANGPTL4; (+) strand; PAM type: YTN; PAM sequence: CTT
  source 1..20: mol_type = other DNA
gtatcttacaaatccaatgc

SEQ ID NO: 17263 - DNA, 20 bp, synthetic construct
  misc_feature 1..20: note = Description of Artificial Sequence: Synthetic oligonucleotide
  misc_feature 1..20: note = Target: ANGPTL4; (+) strand; PAM type: YTN; PAM sequence: TTG
  source 1..20: mol_type = other DNA
tatcttacaaatccaatgct

SEQ ID NO: 17264 - DNA, 20 bp, synthetic construct
  misc_feature 1..20: note = Description of Artificial Sequence: Synthetic oligonucleotide
  misc_feature 1..20: note = Target: ANGPTL4; (+) strand; PAM type: YTN; PAM sequence: CTT
  source 1..20: mol_type = other DNA
acaaatccaatgctccaggt

SEQ ID NO: 17265 - DNA, 20 bp, synthetic construct
  misc_feature 1..20: note = Description of Artificial Sequence: Synthetic oligonucleotide
  misc_feature 1..20: note = Target: ANGPTL4; (+) strand; PAM type: YTN; PAM sequence: TTA
  source 1..20: mol_type = other DNA
caaatccaatgctccaggtc

SEQ ID NO: 17266 - DNA, 20 bp, synthetic construct
  misc_feature 1..20: note = Description of Artificial Sequence: Synthetic oligonucleotide
  misc_feature 1..20: note = Target: ANGPTL4; (+) strand; PAM type: YTN; PAM sequence: CTC
  source 1..20: mol_type = other DNA
caggtccctgacccctcttc

SEQ ID NO: 17267 - DNA, 20 bp, synthetic construct
  misc_feature 1..20: note = Description of Artificial Sequence: Synthetic oligonucleotide
  misc_feature 1..20: note = Target: ANGPTL4; (+) strand; PAM type: YTN; PAM sequence: CTG
  source 1..20: mol_type = other DNA
acccctcttcctccttcctc

SEQ ID NO: 17268 - DNA, 20 bp, synthetic construct
  misc_feature 1..20: note = Description of Artificial Sequence: Synthetic oligonucleotide
  misc_feature 1..20: note = Target: ANGPTL4; (+) strand; PAM type: YTN; PAM sequence: CTC
  source 1..20: mol_type = other DNA
ttcctccttcctctcttgtt

SEQ ID NO: 17269 - DNA, 20 bp, synthetic construct
  misc_feature 1..20: note = Description of Artificial Sequence: Synthetic oligonucleotide
  misc_feature 1..20: note = Target: ANGPTL4; (+) strand; PAM type: YTN; PAM sequence: CTT
  source 1..20: mol_type = other DNA
cctccttcctctcttgttct

SEQ ID NO: 17270 - DNA, 20 bp, synthetic construct
  misc_feature 1..20: note = Description of Artificial Sequence: Synthetic oligonucleotide
  misc_feature 1..20: note = Target: ANGPTL4; (+) strand; PAM type: YTN; PAM sequence: TTC
  source 1..20: mol_type = other DNA
ctccttcctctcttgttctc

SEQ ID NO: 17271 - DNA, 20 bp, synthetic construct
  misc_feature 1..20: note = Description of Artificial Sequence: Synthetic oligonucleotide
  misc_feature 1..20: note = Target: ANGPTL4; (+) strand; PAM type: YTN; PAM sequence: CTC
  source 1..20: mol_type = other DNA
cttcctctcttgttctcctc

SEQ ID NO: 17272 - DNA, 20 bp, synthetic construct
  misc_feature 1..20: note = Description of Artificial Sequence: Synthetic oligonucleotide
  misc_feature 1..20: note = Target: ANGPTL4; (+) strand; PAM type: YTN; PAM sequence: CTT
  source 1..20: mol_type = other DNA
cctctcttgttctcctcctc

SEQ ID NO: 17273 - DNA, 20 bp, synthetic construct
  misc_feature 1..20: note = Description of Artificial Sequence: Synthetic oligonucleotide
  misc_feature 1..20: note = Target: ANGPTL4; (+) strand; PAM type: YTN; PAM sequence: TTC
  source 1..20: mol_type = other DNA
ctctcttgttctcctcctcc

SEQ ID NO: 17274 - DNA, 20 bp, synthetic construct
  misc_feature 1..20: note = Description of Artificial Sequence: Synthetic oligonucleotide
  misc_feature 1..20: note = Target: ANGPTL4; (+) strand; PAM type: YTN; PAM sequence: CTC
  source 1..20: mol_type = other DNA
tcttgttctcctcctccctc

SEQ ID NO: 17275 - DNA, 20 bp, synthetic construct
  misc_feature 1..20: note = Description of Artificial Sequence: Synthetic oligonucleotide
  misc_feature 1..20: note = Target: ANGPTL4; (+) strand; PAM type: YTN; PAM sequence: CTC
  source 1..20: mol_type = other DNA
ttgttctcctcctccctccc

SEQ ID NO: 17276 - DNA, 20 bp, synthetic construct
  misc_feature 1..20: note = Description of Artificial Sequence: Synthetic oligonucleotide
  misc_feature 1..20: note = Target: ANGPTL4; (+) strand; PAM type: YTN; PAM sequence: CTT
  source 1..20: mol_type = other DNA
gttctcctcctccctccccg

SEQ ID NO: 17277 - DNA, 20 bp, synthetic construct
  misc_feature 1..20: note = Description of Artificial Sequence: Synthetic oligonucleotide
  misc_feature 1..20: note = Target: ANGPTL4; (+) strand; PAM type: YTN; PAM sequence: TTG
  source 1..20: mol_type = other DNA
ttctcctcctccctccccgc

SEQ ID NO: 17278 - DNA, 20 bp, synthetic construct
  misc_feature 1..20: note = Description of Artificial Sequence: Synthetic oligonucleotide
  misc_feature 1..20: note = Target: ANGPTL4; (+) strand; PAM type: YTN; PAM sequence: TTC
  source 1..20: mol_type = other DNA
tcctcctccctccccgcccc

SEQ ID NO: 17279 - DNA, 20 bp, synthetic construct
  misc_feature 1..20: note = Description of Artificial Sequence: Synthetic oligonucleotide
  misc_feature 1..20: note = Target: ANGPTL4; (+) strand; PAM type: YTN; PAM sequence: CTC
  source 1..20: mol_type = other DNA
ctcctccctccccgcccccg

SEQ ID NO: 17280 - DNA, 20 bp, synthetic construct
  misc_feature 1..20: note = Description of Artificial Sequence: Synthetic oligonucleotide
  misc_feature 1..20: note = Target: ANGPTL4; (+) strand; PAM type: YTN; PAM sequence: CTC
  source 1..20: mol_type = other DNA
ctccctccccgcccccgccg

SEQ ID NO: 17281 - DNA, 20 bp, synthetic construct
  misc_feature 1..20: note = Description of Artificial Sequence: Synthetic oligonucleotide
  misc_feature 1..20: note = Target: ANGPTL4; (+) strand; PAM type: YTN; PAM sequence: CTC
  source 1..20: mol_type = other DNA
cctccccgcccccgccggcc

SEQ ID NO: 17282 - DNA, 20 bp, synthetic construct
  misc_feature 1..20: note = Description of Artificial Sequence: Synthetic oligonucleotide
  misc_feature 1..20: note = Target: ANGPTL4; (+) strand; PAM type: YTN; PAM sequence: CTC
  source 1..20: mol_type = other DNA
cccgcccccgccggccccct

SEQ ID NO: 17283 - DNA, 20 bp, synthetic construct
  misc_feature 1..20: note = Description of Artificial Sequence: Synthetic oligonucleotide
  misc_feature 1..20: note = Target: ANGPTL4; (+) strand; PAM type: YTN; PAM sequence: CTC
  source 1..20: mol_type = other DNA
cccaccgcagaaagtgggct

SEQ ID NO: 17284 - DNA, 20 bp, synthetic construct
  misc_feature 1..20: note = Description of Artificial Sequence: Synthetic oligonucleotide
  misc_feature 1..20: note = Target: ANGPTL4; (+) strand; PAM type: YTN; PAM sequence: CTT
  source 1..20: mol_type = other DNA
ttgctgccaccacaagttgt

SEQ ID NO: 17285 - DNA, 20 bp, synthetic construct
  misc_feature 1..20: note = Description of Artificial Sequence: Synthetic oligonucleotide
  misc_feature 1..20: note = Target: ANGPTL4; (+) strand; PAM type: YTN; PAM sequence: TTT
  source 1..20: mol_type = other DNA
tgctgccaccacaagttgta

SEQ ID NO: 17286 - DNA, 20 bp, synthetic construct
  misc_feature 1..20: note = Description of Artificial Sequence: Synthetic oligonucleotide
  misc_feature 1..20: note = Target: ANGPTL4; (+) strand; PAM type: YTN; PAM sequence: TTT
  source 1..20: mol_type = other DNA
gctgccaccacaagttgtag

SEQ ID NO: 17287 - DNA, 20 bp, synthetic construct
  misc_feature 1..20: note = Description of Artificial Sequence: Synthetic oligonucleotide
  misc_feature 1..20: note = Target: ANGPTL4; (+) strand; PAM type: YTN; PAM sequence: TTG
  source 1..20: mol_type = other DNA
ctgccaccacaagttgtagg

SEQ ID NO: 17288 - DNA, 20 bp, synthetic construct
  misc_feature 1..20: note = Description of Artificial Sequence: Synthetic oligonucleotide
  misc_feature 1..20: note = Target: ANGPTL4; (+) strand; PAM type: YTN; PAM sequence: CTG
  source 1..20: mol_type = other DNA
ccaccacaagttgtaggtgc

SEQ ID NO: 17289 - DNA, 20 bp, synthetic construct
  misc_feature 1..20: note = Description of Artificial Sequence: Synthetic oligonucleotide
  misc_feature 1..20: note = Target: ANGPTL4; (+) strand; PAM type: YTN; PAM sequence: TTG
  source 1..20: mol_type = other DNA
taggtgctttattcccaaat

SEQ ID NO: 17290 - DNA, 20 bp, synthetic construct
  misc_feature 1..20: note = Description of Artificial Sequence: Synthetic oligonucleotide
  misc_feature 1..20: note = Target: ANGPTL4; (+) strand; PAM type: YTN; PAM sequence: CTT
  source 1..20: mol_type = other DNA
tattcccaaatctccgttca

SEQ ID NO: 17291 - DNA, 20 bp, synthetic construct
  misc_feature 1..20: note = Description of Artificial Sequence: Synthetic oligonucleotide
  misc_feature 1..20: note = Target: ANGPTL4; (+) strand; PAM type: YTN; PAM sequence: TTT
  source 1..20: mol_type = other DNA
attcccaaatctccgttcat

SEQ ID NO: 17292 - DNA, 20 bp, synthetic construct
  misc_feature 1..20: note = Description of Artificial Sequence: Synthetic oligonucleotide
  misc_feature 1..20: note = Target: ANGPTL4; (+) strand; PAM type: YTN; PAM sequence: TTA
  source 1..20: mol_type = other DNA
ttcccaaatctccgttcatc

SEQ ID NO: 17293 - DNA, 20 bp, synthetic construct
  misc_feature 1..20: note = Description of Artificial Sequence: Synthetic oligonucleotide
  misc_feature 1..20: note = Target: ANGPTL4; (+) strand; PAM type: YTN; PAM sequence: TTC
  source 1..20: mol_type = other DNA
ccaaatctccgttcatctcg

SEQ ID NO: 17294 - DNA, 20 bp, synthetic construct
  misc_feature 1..20: note = Description of Artificial Sequence: Synthetic oligonucleotide
  misc_feature 1..20: note = Target: ANGPTL4; (+) strand; PAM type: YTN; PAM sequence: CTC
  source 1..20: mol_type = other DNA
cgttcatctcgaaccacagc

SEQ ID NO: 17295 - DNA, 20 bp, synthetic construct
  misc_feature 1..20: note = Description of Artificial Sequence: Synthetic oligonucleotide
  misc_feature 1..20: note = Target: ANGPTL4; (+) strand; PAM type: YTN; PAM sequence: TTC
  source 1..20: mol_type = other DNA
atctcgaaccacagcatgtc

SEQ ID NO: 17296 - DNA, 20 bp, synthetic construct
  misc_feature 1..20: note = Description of Artificial Sequence: Synthetic oligonucleotide
  misc_feature 1..20: note = Target: ANGPTL4; (+) strand; PAM type: YTN; PAM sequence: CTC
  source 1..20: mol_type = other DNA
gaaccacagcatgtccacgt

SEQ ID NO: 17297 - DNA, 20 bp, synthetic construct
  misc_feature 1..20: note = Description of Artificial Sequence: Synthetic oligonucleotide
  misc_feature 1..20: note = Target: ANGPTL4; (+) strand; PAM type: YTN; PAM sequence: CTC
  source 1..20: mol_type = other DNA
gcggttctctaagttcacgg

SEQ ID NO: 17298 - DNA, 20 bp, synthetic construct
  misc_feature 1..20: note = Description of Artificial Sequence: Synthetic oligonucleotide
  misc_feature 1..20: note = Target: ANGPTL4; (+) strand; PAM type: YTN; PAM sequence: TTC
  source 1..20: mol_type = other DNA
tctaagttcacggccccaca

SEQ ID NO: 17299 - DNA, 20 bp, synthetic construct
  misc_feature 1..20: note = Description of Artificial Sequence: Synthetic oligonucleotide
  misc_feature 1..20: note = Target: ANGPTL4; (+) strand; PAM type: YTN; PAM sequence: CTC
  source 1..20: mol_type = other DNA
taagttcacggccccacacg

SEQ ID NO: 17300 - DNA, 20 bp, synthetic construct
  misc_feature 1..20: note = Description of Artificial Sequence: Synthetic oligonucleotide
  misc_feature 1..20: note = Target: ANGPTL4; (+) strand; PAM type: YTN; PAM sequence: CTA
  source 1..20: mol_type = other DNA
agttcacggccccacacggt

SEQ ID NO: 17301 - DNA, 20 bp, synthetic construct
  misc_feature 1..20: note = Description of Artificial Sequence: Synthetic oligonucleotide
  misc_feature 1..20: note = Target: ANGPTL4; (+) strand; PAM type: YTN; PAM sequence: TTC
  source 1..20: mol_type = other DNA
acggccccacacggtttctc

SEQ ID NO: 17302 - DNA, 20 bp, synthetic construct
  misc_feature 1..20: note = Description of Artificial Sequence: Synthetic oligonucleotide
  misc_feature 1..20: note = Target: ANGPTL4; (+) strand; PAM type: YTN; PAM sequence: TTT
  source 1..20: mol_type = other DNA
ctctgtggtcctcatccttc

SEQ ID NO: 17303 - DNA, 20 bp, synthetic construct
  misc_feature 1..20: note = Description of Artificial Sequence: Synthetic oligonucleotide
  misc_feature 1..20: note = Target: ANGPTL4; (+) strand; PAM type: YTN; PAM sequence: TTC
  source 1..20: mol_type = other DNA
tctgtggtcctcatccttcc

SEQ ID NO: 17304 - DNA, 20 bp, synthetic construct
  misc_feature 1..20: note = Description of Artificial Sequence: Synthetic oligonucleotide
  misc_feature 1..20: note = Target: ANGPTL4; (+) strand; PAM type: YTN; PAM sequence: CTC
  source 1..20: mol_type = other DNA
tgtggtcctcatccttccct

SEQ ID NO: 17305 - DNA, 20 bp, synthetic construct
  misc_feature 1..20: note = Description of Artificial Sequence: Synthetic oligonucleotide
  misc_feature 1..20: note = Target: ANGPTL4; (+) strand; PAM type: YTN; PAM sequence: CTG
  source 1..20: mol_type = other DNA
tggtcctcatccttccctgc

SEQ ID NO: 17306 - DNA, 20 bp, synthetic construct
  misc_feature 1..20: note = Description of Artificial Sequence: Synthetic oligonucleotide
  misc_feature 1..20: note = Target: ANGPTL4; (+) strand; PAM type: YTN; PAM sequence: CTC
  source 1..20: mol_type = other DNA
atccttccctgcatctgtgg

SEQ ID NO: 17307 - DNA, 20 bp, synthetic construct
  misc_feature 1..20: note = Description of Artificial Sequence: Synthetic oligonucleotide
  misc_feature 1..20: note = Target: ANGPTL4; (+) strand; PAM type: YTN; PAM sequence: CTT
  source 1..20: mol_type = other DNA
ccctgcatctgtggctgtcc

SEQ ID NO: 17308 - DNA, 20 bp, synthetic construct
  misc_feature 1..20: note = Description of Artificial Sequence: Synthetic oligonucleotide
  misc_feature 1..20: note = Target: ANGPTL4; (+) strand; PAM type: YTN; PAM sequence: TTC
  source 1..20: mol_type = other DNA
cctgcatctgtggctgtcca

SEQ ID NO: 17309 - DNA, 20 bp, synthetic construct
  misc_feature 1..20: note = Description of Artificial Sequence: Synthetic oligonucleotide
  misc_feature 1..20: note = Target: ANGPTL4; (+) strand; PAM type: YTN; PAM sequence: CTG
  source 1..20: mol_type = other DNA
catctgtggctgtccacagc

SEQ ID NO: 17310 - DNA, 20 bp, synthetic construct
  misc_feature 1..20: note = Description of Artificial Sequence: Synthetic oligonucleotide
  misc_feature 1..20: note = Target: ANGPTL4; (+) strand; PAM type: YTN; PAM sequence: CTG
  source 1..20: mol_type = other DNA
tggctgtccacagccaactg

SEQ ID NO: 17311 - DNA, 20 bp, synthetic construct
  misc_feature 1..20: note = Description of Artificial Sequence: Synthetic oligonucleotide
  misc_feature 1..20: note = Target: ANGPTL4; (+) strand; PAM type: YTN; PAM sequence: CTG
  source 1..20: mol_type = other DNA
tccacagccaactgggtgaa

SEQ ID NO: 17312 - DNA, 20 bp, synthetic construct
  misc_feature 1..20: note = Description of Artificial Sequence: Synthetic oligonucleotide
  misc_feature 1..20: note = Target: ANGPTL4; (+) strand; PAM type: YTN; PAM sequence: CTG
  source 1..20: mol_type = other DNA
ggtgaaagtttggatccccc

SEQ ID NO: 17313 - DNA, 20 bp, synthetic construct
  misc_feature 1..20: note = Description of Artificial Sequence: Synthetic oligonucleotide
  misc_feature 1..20: note = Target: ANGPTL4; (+) strand; PAM type: YTN; PAM sequence: TTT
  source 1..20: mol_type = other DNA
ggatccccctctcacaccct

SEQ ID NO: 17314 - DNA, 20 bp, synthetic construct
  misc_feature 1..20: note = Description of Artificial Sequence: Synthetic oligonucleotide
  misc_feature 1..20: note = Target: ANGPTL4; (+) strand; PAM type: YTN; PAM sequence: TTG
  source 1..20: mol_type = other DNA
gatccccctctcacacccta

SEQ ID NO: 17315 - DNA, 20 bp, synthetic construct
  misc_feature 1..20: note = Description of Artificial Sequence: Synthetic oligonucleotide
  misc_feature 1..20: note = Target: ANGPTL4; (+) strand; PAM type: YTN; PAM sequence: CTC
  source 1..20: mol_type = other DNA
tcacaccctagggtcagtgg

SEQ ID NO: 17316 - DNA, 20 bp, synthetic construct
  misc_feature 1..20: note = Description of Artificial Sequence: Synthetic oligonucleotide
  misc_feature 1..20: note = Target: ANGPTL4; (+) strand; PAM type: YTN; PAM sequence: CTC
  source 1..20: mol_type = other DNA
acaccctagggtcagtggca

SEQ ID NO: 17317 - DNA, 20 bp, synthetic construct
  misc_feature 1..20: note = Description of Artificial Sequence: Synthetic oligonucleotide
  misc_feature 1..20: note = Target: ANGPTL4; (+) strand; PAM type: YTN; PAM sequence: CTA
  source 1..20: mol_type = other DNA
gggtcagtggcaggcttcca

SEQ ID NO: 17318 - DNA, 20 bp, synthetic construct
  misc_feature 1..20: note = Description of Artificial Sequence: Synthetic oligonucleotide
  misc_feature 1..20: note = Target: ANGPTL4; (+) strand; PAM type: YTN; PAM sequence: CTT
  source 1..20: mol_type = other DNA
ccagcactgtagacctgagg

SEQ ID NO: 17319 - DNA, 20 bp, synthetic construct
  misc_feature 1..20: note = Description of Artificial Sequence: Synthetic oligonucleotide
  misc_feature 1..20: note = Target: ANGPTL4; (+) strand; PAM type: YTN; PAM sequence: TTC
  source 1..20: mol_type = other DNA
cagcactgtagacctgaggg

SEQ ID NO: 17320 - DNA, 20 bp, synthetic construct
  misc_feature 1..20: note = Description of Artificial Sequence: Synthetic oligonucleotide
  misc_feature 1..20: note = Target: ANGPTL4; (+) strand; PAM type: YTN; PAM sequence: CTG
  source 1..20: mol_type = other DNA
tagacctgagggttctctcc

SEQ ID NO: 17321 - DNA, 20 bp, synthetic construct
  misc_feature 1..20: note = Description of Artificial Sequence: Synthetic oligonucleotide
  misc_feature 1..20: note = Target: ANGPTL4; (+) strand; PAM type: YTN; PAM sequence: CTG
  source 1..20: mol_type = other DNA
agggttctctcctccccaag

SEQ ID NO: 17322 - DNA, 20 bp, synthetic construct
  misc_feature 1..20: note = Description of Artificial Sequence: Synthetic oligonucleotide
  misc_feature 1..20: note = Target: ANGPTL4; (+) strand; PAM type: YTN; PAM sequence: TTC
  source 1..20: mol_type = other DNA
tctcctccccaagctcccgc

SEQ ID NO: 17323 - DNA, 20 bp, synthetic construct
  misc_feature 1..20: note = Description of Artificial Sequence: Synthetic oligonucleotide
  misc_feature 1..20: note = Target: ANGPTL4; (+) strand; PAM type: YTN; PAM sequence: CTC
  source 1..20: mol_type = other DNA
tcctccccaagctcccgctc

SEQ ID NO: 17324 - DNA, 20 bp, synthetic construct
  misc_feature 1..20: note = Description of Artificial Sequence: Synthetic oligonucleotide
  misc_feature 1..20: note = Target: ANGPTL4; (+) strand; PAM type: YTN; PAM sequence: CTC
  source 1..20: mol_type = other DNA
ctccccaagctcccgctcct

SEQ ID NO: 17325 - DNA, 20 bp, synthetic construct
  misc_feature 1..20: note = Description of Artificial Sequence: Synthetic oligonucleotide
  misc_feature 1..20: note = Target: ANGPTL4; (+) strand; PAM type: YTN; PAM sequence: CTC
  source 1..20: mol_type = other DNA
cccaagctcccgctccttcc

SEQ ID NO: 17326 - DNA, 20 bp, synthetic construct
  misc_feature 1..20: note = Description of Artificial Sequence: Synthetic oligonucleotide
  misc_feature 1..20: note = Target: ANGPTL4; (+) strand; PAM type: YTN; PAM sequence: CTC
  source 1..20: mol_type = other DNA
ccgctccttcccacctccgt

SEQ ID NO: 17327 - DNA, 20 bp, synthetic construct
  misc_feature 1..20: note = Description of Artificial Sequence: Synthetic oligonucleotide
  misc_feature 1..20: note = Target: ANGPTL4; (+) strand; PAM type: YTN; PAM sequence: CTC
  source 1..20: mol_type = other DNA
cttcccacctccgtgctgcc

SEQ ID NO: 17328 - DNA, 20 bp, synthetic construct
  misc_feature 1..20: note = Description of Artificial Sequence: Synthetic oligonucleotide
  misc_feature 1..20: note = Target: ANGPTL4; (+) strand; PAM type: YTN; PAM sequence: CTT
  source 1..20: mol_type = other DNA
cccacctccgtgctgcccgc

SEQ ID NO: 17329 - DNA, 20 bp, synthetic construct
  misc_feature 1..20: note = Description of Artificial Sequence: Synthetic oligonucleotide
  misc_feature 1..20: note = Target: ANGPTL4; (+) strand; PAM type: YTN; PAM sequence: TTC
  source 1..20: mol_type = other DNA
ccacctccgtgctgcccgcc

SEQ ID NO: 17330 - DNA, 20 bp, synthetic construct
  misc_feature 1..20: note = Description of Artificial Sequence: Synthetic oligonucleotide
  misc_feature 1..20: note = Target: ANGPTL4; (+) strand; PAM type: YTN; PAM sequence: CTC
  source 1..20: mol_type = other DNA
cgtgctgcccgcccccaacc

SEQ ID NO: 17331 - DNA, 20 bp, synthetic construct
  misc_feature 1..20: note = Description of Artificial Sequence: Synthetic oligonucleotide
  misc_feature 1..20: note = Target: ANGPTL4; (+) strand; PAM type: YTN; PAM sequence: CTG
  source 1..20: mol_type = other DNA
cccgcccccaaccccgccag

SEQ ID NO: 17332 - DNA, 20 bp, synthetic construct
  misc_feature 1..20: note = Description of Artificial Sequence: Synthetic oligonucleotide
  misc_feature 1..20: note = Target: ANGPTL4; (+) strand; PAM type: YTN; PAM sequence: CTA
  source 1..20: mol_type = other DNA
gcatctcagcgtggtcaggg

SEQ ID NO: 17333 - DNA, 20 bp, synthetic construct
  misc_feature 1..20: note = Description of Artificial Sequence: Synthetic oligonucleotide
  misc_feature 1..20: note = Target: ANGPTL4; (+) strand; PAM type: YTN; PAM sequence: CTC
  source 1..20: mol_type = other DNA
agcgtggtcagggtcctgtc

SEQ ID NO: 17334 - DNA, 20 bp, synthetic construct
  misc_feature 1..20: note = Description of Artificial Sequence: Synthetic oligonucleotide
  misc_feature 1..20: note = Target: ANGPTL4; (+) strand; PAM type: YTN; PAM sequence: CTG
  source 1..20: mol_type = other DNA
tccaccctcccaaagccacc

SEQ ID NO: 17335 - DNA, 20 bp, synthetic construct
  misc_feature 1..20: note = Description of Artificial Sequence: Synthetic oligonucleotide
  misc_feature 1..20: note = Target: ANGPTL4; (+) strand; PAM type: YTN; PAM sequence: CTC
  source 1..20: mol_type = other DNA
ccaaagccaccatcccagga

SEQ ID NO: 17336 - DNA, 20 bp, synthetic construct
  misc_feature 1..20: note = Description of Artificial Sequence: Synthetic oligonucleotide
  misc_feature 1..20: note = Target: ANGPTL4; (+) strand; PAM type: YTN; PAM sequence: CTT
  source 1..20: mol_type = other DNA
ctggagggtgacgggggaag

SEQ ID NO: 17337 - DNA, 20 bp, synthetic construct
  misc_feature 1..20: note = Description of Artificial Sequence: Synthetic oligonucleotide
  misc_feature 1..20: note = Target: ANGPTL4; (+) strand; PAM type: YTN; PAM sequence: TTC
  source 1..20: mol_type = other DNA
tggagggtgacgggggaagg

SEQ ID NO: 17338 - DNA, 20 bp, synthetic construct
  misc_feature 1..20: note = Description of Artificial Sequence: Synthetic oligonucleotide
  misc_feature 1..20: note = Target: ANGPTL4; (+) strand; PAM type: YTN; PAM sequence: CTG
  source 1..20: mol_type = other DNA
gagggtgacgggggaaggca

SEQ ID NO: 17339 - DNA, 20 bp, synthetic construct
  misc_feature 1..20: note = Description of Artificial Sequence: Synthetic oligonucleotide
  misc_feature 1..20: note = Target: ANGPTL4; (+) strand; PAM type: YTN; PAM sequence: CTG
  source 1..20: mol_type = other DNA
gctgggaaatgcggtggaag

SEQ ID NO: 17340 - DNA, 20 bp, synthetic construct
  misc_feature 1..20: note = Description of Artificial Sequence: Synthetic oligonucleotide
  misc_feature 1..20: note = Target: ANGPTL4; (+) strand; PAM type: YTN; PAM sequence: CTG
  source 1..20: mol_type = other DNA
ggaaatgcggtggaaggggg

SEQ ID NO: 17341 - DNA, 20 bp, synthetic construct
  misc_feature 1..20: note = Description of Artificial Sequence: Synthetic oligonucleotide
  misc_feature 1..20: note = Target: ANGPTL4; (+) strand; PAM type: YTN; PAM sequence: TTC
  source 1..20: mol_type = other DNA
tgtgggttcgggactcccag

SEQ ID NO: 17342 - DNA, 20 bp, synthetic construct
  misc_feature 1..20: note = Description of Artificial Sequence: Synthetic oligonucleotide
  misc_feature 1..20: note = Target: ANGPTL4; (+) strand; PAM type: YTN; PAM sequence: CTG
  source 1..20: mol_type = other DNA
tgggttcgggactcccagac

SEQ ID NO: 17343 - DNA, 20 bp, synthetic construct
  misc_feature 1..20: note = Description of Artificial Sequence: Synthetic oligonucleotide
  misc_feature 1..20: note = Target: ANGPTL4; (+) strand; PAM type: YTN; PAM sequence: TTC
  source 1..20: mol_type = other DNA
gggactcccagactcttggc

SEQ ID NO: 17344 - DNA, 20 bp, synthetic construct
  misc_feature 1..20: note = Description of Artificial Sequence: Synthetic oligonucleotide
  misc_feature 1..20: note = Target: ANGPTL4; (+) strand; PAM type: YTN; PAM sequence: CTC
  source 1..20: mol_type = other DNA
ccagactcttggctcaggcc

SEQ ID NO: 17345 - DNA, 20 bp, synthetic construct
  misc_feature 1..20: note = Description of Artificial Sequence: Synthetic oligonucleotide
  misc_feature 1..20: note = Target: ANGPTL4; (+) strand; PAM type: YTN; PAM sequence: CTC
  source 1..20: mol_type = other DNA
ttggctcaggcccgccaagt

SEQ ID NO: 17346 - DNA, 20 bp, synthetic construct
  misc_feature 1..20: note = Description of Artificial Sequence: Synthetic oligonucleotide
  misc_feature 1..20: note = Target: ANGPTL4; (+) strand; PAM type: YTN; PAM sequence: CTT
  source 1..20: mol_type = other DNA
ggctcaggcccgccaagtag

SEQ ID NO: 17347 - DNA, 20 bp, synthetic construct
  misc_feature 1..20: note = Description of Artificial Sequence: Synthetic oligonucleotide
  misc_feature 1..20: note = Target: ANGPTL4; (+) strand; PAM type: YTN; PAM sequence: TTG
  source 1..20: mol_type = other DNA
gctcaggcccgccaagtagg

SEQ ID NO: 17348 - DNA, 20 bp, synthetic construct
  misc_feature 1..20: note = Description of Artificial Sequence: Synthetic oligonucleotide
  misc_feature 1..20: note = Target: ANGPTL4; (+) strand; PAM type: YTN; PAM sequence: CTC
  source 1..20: mol_type = other DNA
aggcccgccaagtaggagaa

SEQ ID NO: 17349 - DNA, 20 bp, synthetic construct
  misc_feature 1..20: note = Description of Artificial Sequence: Synthetic oligonucleotide
  misc_feature 1..20: note = Target: ANGPTL4; (+) strand; PAM type: YTN; PAM sequence: TTC
  source 1..20: mol_type = other DNA
agagctgggaaggcgaacag

SEQ ID NO: 17350 - DNA, 20 bp, synthetic construct
  misc_feature 1..20: note = Description of Artificial Sequence: Synthetic oligonucleotide
  misc_feature 1..20: note = Target: ANGPTL4; (+) strand; PAM type: YTN; PAM sequence: CTG
  source 1..20: mol_type = other DNA
ggaaggcgaacagctggcat

SEQ ID NO: 17351 - DNA, 20 bp, synthetic construct
  misc_feature 1..20: note = Description of Artificial Sequence: Synthetic oligonucleotide
  misc_feature 1..20: note = Target: ANGPTL4; (+) strand; PAM type: YTN; PAM sequence: CTG
  source 1..20: mol_type = other DNA
gcattcatggaagccacact

SEQ ID NO: 17352 - DNA, 20 bp, synthetic construct
  misc_feature 1..20: note = Description of Artificial Sequence: Synthetic oligonucleotide
  misc_feature 1..20: note = Target: ANGPTL4; (+) strand; PAM type: YTN; PAM sequence: TTC
  source 1..20: mol_type = other DNA
atggaagccacactggtggt

SEQ ID NO: 17353 - DNA, 20 bp, synthetic construct
  misc_feature 1..20: note = Description of Artificial Sequence: Synthetic oligonucleotide
  misc_feature 1..20: note = Target: ANGPTL4; (+) strand; PAM type: YTN; PAM sequence: CTG
  source 1..20: mol_type = other DNA
gtggtttggccgcgtgccca

SEQ ID NO: 17354 - DNA, 20 bp, synthetic construct
  misc_feature 1..20: note = Description of Artificial Sequence: Synthetic oligonucleotide
  misc_feature 1..20: note = Target: ANGPTL4; (+) strand; PAM type: YTN; PAM sequence: TTT
  source 1..20: mol_type = other DNA
ggccgcgtgcccatccttac

SEQ ID NO: 17355 - DNA, 20 bp, synthetic construct
  misc_feature 1..20: note = Description of Artificial Sequence: Synthetic oligonucleotide
  misc_feature 1..20: note = Target: ANGPTL4; (+) strand; PAM type: YTN; PAM sequence: TTG
  source 1..20: mol_type = other DNA
gccgcgtgcccatccttact

SEQ ID NO: 17356 - DNA, 20 bp, synthetic construct
  misc_feature 1..20: note = Description of Artificial Sequence: Synthetic oligonucleotide
  misc_feature 1..20: note = Target: ANGPTL4; (+) strand; PAM type: YTN; PAM sequence: CTT
  source 1..20: mol_type = other DNA
actggatgggaggaaagtag

SEQ ID NO: 17357 - DNA, 20 bp, synthetic construct
  misc_feature 1..20: note = Description of Artificial Sequence: Synthetic oligonucleotide
  misc_feature 1..20: note = Target: ANGPTL4; (+) strand; PAM type: YTN; PAM sequence: TTA
  source 1..20: mol_type = other DNA
ctggatgggaggaaagtagg

SEQ ID NO: 17358 - DNA, 20 bp, synthetic construct
  misc_feature 1..20: note = Description of Artificial Sequence: Synthetic oligonucleotide
  misc_feature 1..20: note = Target: ANGPTL4; (+) strand; PAM type: YTN; PAM sequence: CTG
  source 1..20: mol_type = other DNA
gatgggaggaaagtagggga

SEQ ID NO: 17359 - DNA, 20 bp, synthetic construct
  misc_feature 1..20: note = Description of Artificial Sequence: Synthetic oligonucleotide
  misc_feature 1..20: note = Target: ANGPTL4; (+) strand; PAM type: YTN; PAM sequence: CTG
  source 1..20: mol_type = other DNA
aggggccggaaagcgtcttc

SEQ ID NO: 17360 - DNA, 20 bp, synthetic construct
  misc_feature 1..20: note = Description of Artificial Sequence: Synthetic oligonucleotide
  misc_feature 1..20: note = Target: ANGPTL4; (+) strand; PAM type: YTN; PAM sequence: CTT
  source 1..20: mol_type = other DNA
cctggtcactctgggcccgc

SEQ ID NO: 17361 - DNA, 20 bp, synthetic construct
  misc_feature 1..20: note = Description of Artificial Sequence: Synthetic oligonucleotide
  misc_feature 1..20: note = Target: ANGPTL4; (+) strand; PAM type: YTN; PAM sequence: TTC
  source 1..20: mol_type = other DNA
ctggtcactctgggcccgcc

SEQ ID NO: 17362 - DNA, 20 bp, synthetic construct
  misc_feature 1..20: note = Description of Artificial Sequence: Synthetic oligonucleotide
  misc_feature 1..20: note = Target: ANGPTL4; (+) strand; PAM type: YTN; PAM sequence: CTG
  source 1..20: mol_type = other DNA
gtcactctgggcccgccccc

SEQ ID NO: 17363 - DNA, 20 bp, synthetic construct
  misc_feature 1..20: note = Description of Artificial Sequence: Synthetic oligonucleotide
  misc_feature 1..20: note = Target: ANGPTL4; (+) strand; PAM type: YTN; PAM sequence: CTC
  source 1..20: mol_type = other DNA
tgggcccgcccccaccccca

SEQ ID NO: 17364 - DNA, 20 bp, synthetic construct
  misc_feature 1..20: note = Description of Artificial Sequence: Synthetic oligonucleotide
  misc_feature 1..20: note = Target: ANGPTL4; (+) strand; PAM type: YTN; PAM sequence: CTG
  source 1..20: mol_type = other DNA
ggcccgcccccacccccacc

SEQ ID NO: 17365 - DNA, 20 bp, synthetic construct
  misc_feature 1..20: note = Description of Artificial Sequence: Synthetic oligonucleotide
  misc_feature 1..20: note = Target: ANGPTL4; (+) strand; PAM type: YTN; PAM sequence: CTC
  source 1..20: mol_type = other DNA
atttcgacctttcccctact

SEQ ID NO: 17366 - DNA, 20 bp, synthetic construct
  misc_feature 1..20: note = Description of Artificial Sequence: Synthetic oligonucleotide
  misc_feature 1..20: note = Target: ANGPTL4; (+) strand; PAM type: YTN; PAM sequence: TTT
  source 1..20: mol_type = other DNA
cgacctttcccctacttttc

SEQ ID NO: 17367 - DNA, 20 bp, synthetic construct
  misc_feature 1..20: note = Description of Artificial Sequence: Synthetic oligonucleotide
  misc_feature 1..20: note = Target: ANGPTL4; (+) strand; PAM type: YTN; PAM sequence: TTC
  source 1..20: mol_type = other DNA
gacctttcccctacttttcc

SEQ ID NO: 17368 - DNA, 20 bp, synthetic construct
  misc_feature 1..20: note = Description of Artificial Sequence: Synthetic oligonucleotide
  misc_feature 1..20: note = Target: ANGPTL4; (+) strand; PAM type: YTN; PAM sequence: CTT
  source 1..20: mol_type = other DNA
tcccctacttttccggctgg

SEQ ID NO: 17369 - DNA, 20 bp, synthetic construct
  misc_feature 1..20: note = Description of Artificial Sequence: Synthetic oligonucleotide
  misc_feature 1..20: note = Target: ANGPTL4; (+) strand; PAM type: YTN; PAM sequence: TTT
  source 1..20: mol_type = other DNA
cccctacttttccggctggg

SEQ ID NO: 17370 - DNA, 20 bp, synthetic construct
  misc_feature 1..20: note = Description of Artificial Sequence: Synthetic oligonucleotide
  misc_feature 1..20: note = Target: ANGPTL4; (+) strand; PAM type: YTN; PAM sequence: TTC
  source 1..20: mol_type = other DNA
ccctacttttccggctgggc

SEQ ID NO: 17371 - DNA, 20 bp, synthetic construct
  misc_feature 1..20: note = Description of Artificial Sequence: Synthetic oligonucleotide
  misc_feature 1..20: note = Target: ANGPTL4; (+) strand; PAM type: YTN; PAM sequence: CTA
  source 1..20: mol_type = other DNA
cttttccggctgggctgggg

SEQ ID NO: 17372 - DNA, 20 bp, synthetic construct
  misc_feature 1..20: note = Description of Artificial Sequence: Synthetic oligonucleotide
  misc_feature 1..20: note = Target: ANGPTL4; (+) strand; PAM type: YTN; PAM sequence: CTT
  source 1..20: mol_type = other DNA
ttccggctgggctgggggcg

SEQ ID NO: 17373 - DNA, 20 bp, synthetic construct
  misc_feature 1..20: note = Description of Artificial Sequence: Synthetic oligonucleotide
  misc_feature 1..20: note = Target: ANGPTL4; (+) strand; PAM type: YTN; PAM sequence: TTT
  source 1..20: mol_type = other DNA
tccggctgggctgggggcgg

SEQ ID NO: 17374 - DNA, 20 bp, synthetic construct
  misc_feature 1..20: note = Description of Artificial Sequence: Synthetic oligonucleotide
  misc_feature 1..20: note = Target: ANGPTL4; (+) strand; PAM type: YTN; PAM sequence: TTT
  source 1..20: mol_type = other DNA
ccggctgggctgggggcggt

SEQ ID NO: 17375 - DNA, 20 bp, synthetic construct
  misc_feature 1..20: note = Description of Artificial Sequence: Synthetic oligonucleotide
  misc_feature 1..20: note = Target: ANGPTL4; (+) strand; PAM type: YTN; PAM sequence: TTC
  source 1..20: mol_type = other DNA
cggctgggctgggggcggtt

SEQ ID NO: 17376 - DNA, 20 bp, synthetic construct
  misc_feature 1..20: note = Description of Artificial Sequence: Synthetic oligonucleotide
  misc_feature 1..20: note = Target: ANGPTL4; (+) strand; PAM type: YTN; PAM sequence: CTG
  source 1..20: mol_type = other DNA
ggctgggggcggttcctccc

SEQ ID NO: 17377 - DNA, 20 bp, synthetic construct
  misc_feature 1..20: note = Description of Artificial Sequence: Synthetic oligonucleotide
  misc_feature 1..20: note = Target: ANGPTL4; (+) strand; PAM type: YTN; PAM sequence: CTG
  source 1..20: mol_type = other DNA
ggggcggttcctcccagtct

SEQ ID NO: 17378 - DNA, 20 bp, synthetic construct
  misc_feature 1..20: note = Description of Artificial Sequence: Synthetic oligonucleotide
  misc_feature 1..20: note = Target: ANGPTL4; (+) strand; PAM type: YTN; PAM sequence: TTC
  source 1..20: mol_type = other DNA
ctcccagtctggagcgtctg

SEQ ID NO: 17379 - DNA, 20 bp, synthetic construct
  misc_feature 1..20: note = Description of Artificial Sequence: Synthetic oligonucleotide
  misc_feature 1..20: note = Target: ANGPTL4; (+) strand; PAM type: YTN; PAM sequence: CTC
  source 1..20: mol_type = other DNA
ccagtctggagcgtctgagc

SEQ ID NO: 17380 - DNA, 20 bp, synthetic construct
  misc_feature 1..20: note = Description of Artificial Sequence: Synthetic oligonucleotide
  misc_feature 1..20: note = Target: ANGPTL4; (+) strand; PAM type: YTN; PAM sequence: CTG
  source 1..20: mol_type = other DNA
gagcgtctgagcctccagac

SEQ ID NO: 17381 - DNA, 20 bp, synthetic construct
  misc_feature 1..20: note = Description of Artificial Sequence: Synthetic oligonucleotide
  misc_feature 1..20: note = Target: ANGPTL4; (+) strand; PAM type: YTN; PAM sequence: CTG
  source 1..20: mol_type = other DNA
agcctccagacgtgctcaac

SEQ ID NO: 17382 - DNA, 20 bp, synthetic construct
  misc_feature 1..20: note = Description of Artificial Sequence: Synthetic oligonucleotide
  misc_feature 1..20: note = Target: ANGPTL4; (+) strand; PAM type: YTN; PAM sequence: CTC
  source 1..20: mol_type = other DNA
cagacgtgctcaacgccatc

SEQ ID NO: 17383 - DNA, 20 bp, synthetic construct
  misc_feature 1..20: note = Description of Artificial Sequence: Synthetic oligonucleotide
  misc_feature 1..20: note = Target: ANGPTL4; (+) strand; PAM type: YTN; PAM sequence: CTC
  source 1..20: mol_type = other DNA
aacgccatcctcccctcctc

SEQ ID NO: 17384 - DNA, 20 bp, synthetic construct
  misc_feature 1..20: note = Description of Artificial Sequence: Synthetic oligonucleotide
  misc_feature 1..20: note = Target: ANGPTL4; (+) strand; PAM type: YTN; PAM sequence: CTC
  source 1..20: mol_type = other DNA
ccctcctccctccctctttc

SEQ ID NO: 17385 - DNA, 20 bp, synthetic construct
  misc_feature 1..20: note = Description of Artificial Sequence: Synthetic oligonucleotide
  misc_feature 1..20: note = Target: ANGPTL4; (+) strand; PAM type: YTN; PAM sequence: CTC
  source 1..20: mol_type = other DNA
ctccctccctctttctttcc

SEQ ID NO: 17386 - DNA, 20 bp, synthetic construct
  misc_feature 1..20: note = Description of Artificial Sequence: Synthetic oligonucleotide
  misc_feature 1..20: note = Target: ANGPTL4; (+) strand; PAM type: YTN; PAM sequence: CTC
  source 1..20: mol_type = other DNA
cctccctctttctttcctca

SEQ ID NO: 17387 - DNA, 20 bp, synthetic construct
  misc_feature 1..20: note = Description of Artificial Sequence: Synthetic oligonucleotide
  misc_feature 1..20: note = Target: ANGPTL4; (+) strand; PAM type: YTN; PAM sequence: CTC
  source 1..20: mol_type = other DNA
cctctttctttcctcaaccc

SEQ ID NO: 17388 - DNA, 20 bp, synthetic construct
  misc_feature 1..20: note = Description of Artificial Sequence: Synthetic oligonucleotide
  misc_feature 1..20: note = Target: ANGPTL4; (+) strand; PAM type: YTN; PAM sequence: CTC
  source 1..20: mol_type = other DNA
tttctttcctcaaccctgcc

SEQ ID NO: 17389 - DNA, 20 bp, synthetic construct
  misc_feature 1..20: note = Description of Artificial Sequence: Synthetic oligonucleotide
  misc_feature 1..20: note = Target: ANGPTL4; (+) strand; PAM type: YTN; PAM sequence: CTT
  source 1..20: mol_type = other DNA
tctttcctcaaccctgcctc

SEQ ID NO: 17390 - DNA, 20 bp, synthetic construct
  misc_feature 1..20: note = Description of Artificial Sequence: Synthetic oligonucleotide
  misc_feature 1..20: note = Target: ANGPTL4; (+) strand; PAM type: YTN; PAM sequence: TTT
  source 1..20: mol_type = other DNA
ctttcctcaaccctgcctcc

SEQ ID NO: 17391 - DNA, 20 bp, synthetic construct
  misc_feature 1..20: note = Description of Artificial Sequence: Synthetic oligonucleotide
  misc_feature 1..20: note = Target: ANGPTL4; (+) strand; PAM type: YTN; PAM sequence: TTC
  source 1..20: mol_type = other DNA
tttcctcaaccctgcctcct

SEQ ID NO: 17392 - DNA, 20 bp, synthetic construct
  misc_feature 1..20: note = Description of Artificial Sequence: Synthetic oligonucleotide
  misc_feature 1..20: note = Target: ANGPTL4; (+) strand; PAM type: YTN; PAM sequence: CTT
  source 1..20: mol_type = other DNA
tcctcaaccctgcctcctct

SEQ ID NO: 17393 - DNA, 20 bp, synthetic construct
  misc_feature 1..20: note = Description of Artificial Sequence: Synthetic oligonucleotide
  misc_feature 1..20: note = Target: ANGPTL4; (+) strand; PAM type: YTN; PAM sequence: TTT
  source 1..20: mol_type = other DNA
cctcaaccctgcctcctctc

SEQ ID NO: 17394 - DNA, 20 bp, synthetic construct
  misc_feature 1..20: note = Description of Artificial Sequence: Synthetic oligonucleotide
  misc_feature 1..20: note = Target: ANGPTL4; (+) strand; PAM type: YTN; PAM sequence: TTC
  source 1..20: mol_type = other DNA
ctcaaccctgcctcctctcc

SEQ ID NO: 17395 - DNA, 20 bp, synthetic construct
  misc_feature 1..20: note = Description of Artificial Sequence: Synthetic oligonucleotide
  misc_feature 1..20: note = Target: ANGPTL4; (+) strand; PAM type: YTN; PAM sequence: CTC
  source 1..20: mol_type = other DNA
aaccctgcctcctctccctc

SEQ ID NO: 17396 - DNA, 20 bp, synthetic construct
  misc_feature 1..20: note = Description of Artificial Sequence: Synthetic oligonucleotide
  misc_feature 1..20: note = Target: ANGPTL4; (+) strand; PAM type: YTN; PAM sequence: CTG
  source 1..20: mol_type = other DNA
cctcctctccctctaggagc

SEQ ID NO: 17397 - DNA, 20 bp, synthetic construct
  misc_feature 1..20: note = Description of Artificial Sequence: Synthetic oligonucleotide
  misc_feature 1..20: note = Target: ANGPTL4; (+) strand; PAM type: YTN; PAM sequence: CTC
  source 1..20: mol_type = other DNA
ctctccctctaggagctggg

SEQ ID NO: 17398 - DNA, 20 bp, synthetic construct
  misc_feature 1..20: note = Description of Artificial Sequence: Synthetic oligonucleotide
  misc_feature 1..20: note = Target: ANGPTL4; (+) strand; PAM type: YTN; PAM sequence: CTC
  source 1..20: mol_type = other DNA
tccctctaggagctgggacc

SEQ ID NO: 17399 - DNA, 20 bp, synthetic construct
  misc_feature 1..20: note = Description of Artificial Sequence: Synthetic oligonucleotide
  misc_feature 1..20: note = Target: ANGPTL4; (+) strand; PAM type: YTN; PAM sequence: CTC
  source 1..20: mol_type = other DNA
cctctaggagctgggacccc

SEQ ID NO: 17400 - DNA, 20 bp, synthetic construct
  misc_feature 1..20: note = Description of Artificial Sequence: Synthetic oligonucleotide
  misc_feature 1..20: note = Target: ANGPTL4; (+) strand; PAM type: YTN; PAM sequence: CTC
  source 1..20: mol_type = other DNA
taggagctgggaccccaggc

SEQ ID NO: 17401 - DNA, 20 bp, synthetic construct
  misc_feature 1..20: note = Description of Artificial Sequence: Synthetic oligonucleotide
  misc_feature 1..20: note = Target: ANGPTL4; (+) strand; PAM type: YTN; PAM sequence: CTA
  source 1..20: mol_type = other DNA
ggagctgggaccccaggcag

SEQ ID NO: 17402 - DNA, 20 bp, synthetic construct
  misc_feature 1..20: note = Description of Artificial Sequence: Synthetic oligonucleotide
  misc_feature 1..20: note = Target: ANGPTL4; (+) strand; PAM type: YTN; PAM sequence: CTG
  source 1..20: mol_type = other DNA
ggaccccaggcagagcctct

SEQ ID NO: 17403 - DNA, 20 bp, synthetic construct
  misc_feature 1..20: note = Description of Artificial Sequence: Synthetic oligonucleotide
  misc_feature 1..20: note = Target: ANGPTL4; (+) strand; PAM type: YTN; PAM sequence: CTC
  source 1..20: mol_type = other DNA
tgagatgctcctgctcagca

SEQ ID NO: 17404 - DNA, 20 bp, synthetic construct
  misc_feature 1..20: note = Description of Artificial Sequence: Synthetic oligonucleotide
  misc_feature 1..20: note = Target: ANGPTL4; (+) strand; PAM type: YTN; PAM sequence: CTG
  source 1..20: mol_type = other DNA
agatgctcctgctcagcaca

SEQ ID NO: 17405 - DNA, 20 bp, synthetic construct
  misc_feature 1..20: note = Description of Artificial Sequence: Synthetic oligonucleotide
  misc_feature 1..20: note = Target: ANGPTL4; (+) strand; PAM type: YTN; PAM sequence: CTC
  source 1..20: mol_type = other DNA
ctgctcagcacagttcttcc

SEQ ID NO: 17406 - DNA, 20 bp, synthetic construct
  misc_feature 1..20: note = Description of Artificial Sequence: Synthetic oligonucleotide
  misc_feature 1..20: note = Target: ANGPTL4; (+) strand; PAM type: YTN; PAM sequence: CTG
  source 1..20: mol_type = other DNA
ctcagcacagttcttcccgt

SEQ ID NO: 17407 - DNA, 20 bp, synthetic construct
  misc_feature 1..20: note = Description of Artificial Sequence: Synthetic oligonucleotide
  misc_feature 1..20: note = Target: ANGPTL4; (+) strand; PAM type: YTN; PAM sequence: CTC
  source 1..20: mol_type = other DNA
agcacagttcttcccgttct

SEQ ID NO: 17408 - DNA, 20 bp, synthetic construct
  misc_feature 1..20: note = Description of Artificial Sequence: Synthetic oligonucleotide
  misc_feature 1..20: note = Target: ANGPTL4; (+) strand; PAM type: YTN; PAM sequence: TTC
  source 1..20: mol_type = other DNA
ttcccgttctggacctgctg

SEQ ID NO: 17409 - DNA, 20 bp, synthetic construct
  misc_feature 1..20: note = Description of Artificial Sequence: Synthetic oligonucleotide
  misc_feature 1..20: note = Target: ANGPTL4; (+) strand; PAM type: YTN; PAM sequence: CTT
  source 1..20: mol_type = other DNA
cccgttctggacctgctgcc

SEQ ID NO: 17410 - DNA, 20 bp, synthetic construct
  misc_feature 1..20: note = Description of Artificial Sequence: Synthetic oligonucleotide
  misc_feature 1..20: note = Target: ANGPTL4; (+) strand; PAM type: YTN; PAM sequence: TTC
  source 1..20: mol_type = other DNA
ccgttctggacctgctgcct

SEQ ID NO: 17411 - DNA, 20 bp, synthetic construct
  misc_feature 1..20: note = Description of Artificial Sequence: Synthetic oligonucleotide
  misc_feature 1..20: note = Target: ANGPTL4; (+) strand; PAM type: YTN; PAM sequence: TTC
  source 1..20: mol_type = other DNA
tggacctgctgcctcattca

SEQ ID NO: 17412 - DNA, 20 bp, synthetic construct
  misc_feature 1..20: note = Description of Artificial Sequence: Synthetic oligonucleotide
  misc_feature 1..20: note = Target: ANGPTL4; (+) strand; PAM type: YTN; PAM sequence: CTG
  source 1..20: mol_type = other DNA
gacctgctgcctcattcatt

SEQ ID NO: 17413 - DNA, 20 bp, synthetic construct
  misc_feature 1..20: note = Description of Artificial Sequence: Synthetic oligonucleotide
  misc_feature 1..20: note = Target: ANGPTL4; (+) strand; PAM type: YTN; PAM sequence: CTG
  source 1..20: mol_type = other DNA
ctgcctcattcattcattca

SEQ ID NO: 17414 - DNA, 20 bp, synthetic construct
  misc_feature 1..20: note = Description of Artificial Sequence: Synthetic oligonucleotide
  misc_feature 1..20: note = Target: ANGPTL4; (+) strand; PAM type: YTN; PAM sequence: CTG
  source 1..20: mol_type = other DNA
cctcattcattcattcattc

SEQ ID NO: 17415 - DNA, 20 bp, synthetic construct
  misc_feature 1..20: note = Description of Artificial Sequence: Synthetic oligonucleotide
  misc_feature 1..20: note = Target: ANGPTL4; (+) strand; PAM type: YTN; PAM sequence: CTC
  source 1..20: mol_type = other DNA
attcattcattcattcattc

SEQ ID NO: 17416 - DNA, 20 bp, synthetic construct
  misc_feature 1..20: note = Description of Artificial Sequence: Synthetic oligonucleotide
  misc_feature 1..20: note = Target: ANGPTL4; (+) strand; PAM type: YTN; PAM sequence: TTC
  source 1..20: mol_type = other DNA
attcattcattcattcattt

SEQ ID NO: 17417 - DNA, 20 bp, synthetic construct
  misc_feature 1..20: note = Description of Artificial Sequence: Synthetic oligonucleotide
  misc_feature 1..20: note = Target: ANGPTL4; (+) strand; PAM type: YTN; PAM sequence: TTC
  source 1..20: mol_type = other DNA
attcattcattcatttgtca

SEQ ID NO: 17418 - DNA, 20 bp, synthetic construct
  misc_feature 1..20: note = Description of Artificial Sequence: Synthetic oligonucleotide
  misc_feature 1..20: note = Target: ANGPTL4; (+) strand; PAM type: YTN; PAM sequence: TTC
  source 1..20: mol_type = other DNA
attcattcatttgtcaagac

SEQ ID NO: 17419 - DNA, 20 bp, synthetic construct
  misc_feature 1..20: note = Description of Artificial Sequence: Synthetic oligonucleotide
  misc_feature 1..20: note = Target: ANGPTL4; (+) strand; PAM type: YTN; PAM sequence: TTC
  source 1..20: mol_type = other DNA
attcatttgtcaagactgtt

SEQ ID NO: 17420 - DNA, 20 bp, synthetic construct
  misc_feature 1..20: note = Description of Artificial Sequence: Synthetic oligonucleotide
  misc_feature 1..20: note = Target: ANGPTL4; (+) strand; PAM type: YTN; PAM sequence: TTC
  source 1..20: mol_type = other DNA
atttgtcaagactgttttgt

SEQ ID NO: 17421 - DNA, 20 bp, synthetic construct
  misc_feature 1..20: note = Description of Artificial Sequence: Synthetic oligonucleotide
  misc_feature 1..20: note = Target: ANGPTL4; (+) strand; PAM type: YTN; PAM sequence: TTT
  source 1..20: mol_type = other DNA
gtcaagactgttttgtttgc

SEQ ID NO: 17422 - DNA, 20 bp, synthetic construct
  misc_feature 1..20: note = Description of Artificial Sequence: Synthetic oligonucleotide
  misc_feature 1..20: note = Target: ANGPTL4; (+) strand; PAM type: YTN; PAM sequence: TTG
  source 1..20: mol_type = other DNA
tcaagactgttttgtttgct

SEQ ID NO: 17423 - DNA, 20 bp, synthetic construct
  misc_feature 1..20: note = Description of Artificial Sequence: Synthetic oligonucleotide
  misc_feature 1..20: note = Target: ANGPTL4; (+) strand; PAM type: YTN; PAM sequence: CTG
  source 1..20: mol_type = other DNA
ttttgtttgctttttgagac

SEQ ID NO: 17424 - DNA, 20 bp, synthetic construct
  misc_feature 1..20: note = Description of Artificial Sequence: Synthetic oligonucleotide
  misc_feature 1..20: note = Target: ANGPTL4; (+) strand; PAM type: YTN; PAM sequence: TTT
  source 1..20: mol_type = other DNA
tgtttgctttttgagacgga

SEQ ID NO: 17425 - DNA, 20 bp, synthetic construct
  misc_feature 1..20: note = Description of Artificial Sequence: Synthetic oligonucleotide
  misc_feature 1..20: note = Target: ANGPTL4; (+) strand; PAM type: YTN; PAM sequence: TTT
  source 1..20: mol_type = other DNA
gtttgctttttgagacggag

SEQ ID NO: 17426 - DNA, 20 bp, synthetic construct
  misc_feature 1..20: note = Description of Artificial Sequence: Synthetic oligonucleotide
  misc_feature 1..20: note = Target: ANGPTL4; (+) strand; PAM type: YTN; PAM sequence: TTG
  source 1..20: mol_type = other DNA
tttgctttttgagacggagt

SEQ ID NO: 17427 - DNA, 20 bp, synthetic construct
  misc_feature 1..20: note = Description of Artificial Sequence: Synthetic oligonucleotide
  misc_feature 1..20: note = Target: ANGPTL4; (+) strand; PAM type: YTN; PAM sequence: TTT
  source 1..20: mol_type = other DNA
gctttttgagacggagtctc

SEQ ID NO: 17428 - DNA, 20 bp, synthetic construct
  misc_feature 1..20: note = Description of Artificial Sequence: Synthetic oligonucleotide
  misc_feature 1..20: note = Target: ANGPTL4; (+) strand; PAM type: YTN; PAM sequence: TTG
  source 1..20: mol_type = other DNA
ctttttgagacggagtctcg

SEQ ID NO: 17429 - DNA, 20 bp, synthetic construct
  misc_feature 1..20: note = Description of Artificial Sequence: Synthetic oligonucleotide
  misc_feature 1..20: note = Target: ANGPTL4; (+) strand; PAM type: YTN; PAM sequence: CTT
  source 1..20: mol_type = other DNA
tttgagacggagtctcgctc

SEQ ID NO: 17430 - DNA, 20 bp, synthetic construct
  misc_feature 1..20: note = Description of Artificial Sequence: Synthetic oligonucleotide
  misc_feature 1..20: note = Target: ANGPTL4; (+) strand; PAM type: YTN; PAM sequence: TTT
  source 1..20: mol_type = other DNA
ttgagacggagtctcgctct

SEQ ID NO: 17431 - DNA, 20 bp, synthetic construct
  misc_feature 1..20: note = Description of Artificial Sequence: Synthetic oligonucleotide
  misc_feature 1..20: note = Target: ANGPTL4; (+) strand; PAM type: YTN; PAM sequence: TTT
  source 1..20: mol_type = other DNA
tgagacggagtctcgctctg

SEQ ID NO: 17432 - DNA, 20 bp, synthetic construct
  misc_feature 1..20: note = Description of Artificial Sequence: Synthetic oligonucleotide
  misc_feature 1..20: note = Target: ANGPTL4; (+) strand; PAM type: YTN; PAM sequence: TTT
  source 1..20: mol_type = other DNA
gagacggagtctcgctctgt

SEQ ID NO: 17433 - DNA, 20 bp, synthetic construct
  misc_feature 1..20: note = Description of Artificial Sequence: Synthetic oligonucleotide
  misc_feature 1..20: note = Target: ANGPTL4; (+) strand; PAM type: YTN; PAM sequence: TTG
  source 1..20: mol_type = other DNA
agacggagtctcgctctgtt

SEQ ID NO: 17434 - DNA, 20 bp, synthetic construct
  misc_feature 1..20: note = Description of Artificial Sequence: Synthetic oligonucleotide
  misc_feature 1..20: note = Target: ANGPTL4; (+) strand; PAM type: YTN; PAM sequence: CTC
  source 1..20: mol_type = other DNA
gctctgttgtccaggctgga

SEQ ID NO: 17435 - DNA, 20 bp, synthetic construct
  misc_feature 1..20: note = Description of Artificial Sequence: Synthetic oligonucleotide
  misc_feature 1..20: note = Target: ANGPTL4; (+) strand; PAM type: YTN; PAM sequence: CTC
  source 1..20: mol_type = other DNA
tgttgtccaggctggagtgc

SEQ ID NO: 17436 - DNA, 20 bp, synthetic construct
  misc_feature 1..20: note = Description of Artificial Sequence: Synthetic oligonucleotide
  misc_feature 1..20: note = Target: ANGPTL4; (+) strand; PAM type: YTN; PAM sequence: CTG
  source 1..20: mol_type = other DNA
ttgtccaggctggagtgcag

SEQ ID NO: 17437 - DNA, 20 bp, synthetic construct
  misc_feature 1..20: note = Description of Artificial Sequence: Synthetic oligonucleotide
  misc_feature 1..20: note = Target: ANGPTL4; (+) strand; PAM type: YTN; PAM sequence: TTG
  source 1..20: mol_type = other DNA
tccaggctggagtgcagtgg

SEQ ID NO: 17438 - DNA, 20 bp, synthetic construct
  misc_feature 1..20: note = Description of Artificial Sequence: Synthetic oligonucleotide
  misc_feature 1..20: note = Target: ANGPTL4; (+) strand; PAM type: YTN; PAM sequence: CTG
  source 1..20: mol_type = other DNA
gagtgcagtggcgcaatctc

SEQ ID NO: 17439 - DNA, 20 bp, synthetic construct
  misc_feature 1..20: note = Description of Artificial Sequence: Synthetic oligonucleotide
  misc_feature 1..20: note = Target: ANGPTL4; (+) strand; PAM type: YTN; PAM sequence: CTC
  source 1..20: mol_type = other DNA
agctcactgcaacctctgcc

SEQ ID NO: 17440 - DNA, 20 bp, synthetic construct
  misc_feature 1..20: note = Description of Artificial Sequence: Synthetic oligonucleotide
  misc_feature 1..20: note = Target: ANGPTL4; (+) strand; PAM type: YTN; PAM sequence: CTC
  source 1..20: mol_type = other DNA
actgcaacctctgcctccca

SEQ ID NO: 17441 - DNA, 20 bp, synthetic construct
  misc_feature 1..20: note = Description of Artificial Sequence: Synthetic oligonucleotide
  misc_feature 1..20: note = Target: ANGPTL4; (+) strand; PAM type: YTN; PAM sequence: CTG
  source 1..20: mol_type = other DNA
caacctctgcctcccactgg

SEQ ID NO: 17442 - DNA, 20 bp, synthetic construct
  misc_feature 1..20: note = Description of Artificial Sequence: Synthetic oligonucleotide
  misc_feature 1..20: note = Target: ANGPTL4; (+) strand; PAM type: YTN; PAM sequence: CTC
  source 1..20: mol_type = other DNA
tgcctcccactgggttcaag

SEQ ID NO: 17443 - DNA, 20 bp, synthetic construct
  misc_feature 1..20: note = Description of Artificial Sequence: Synthetic oligonucleotide
  misc_feature 1..20: note = Target: ANGPTL4; (+) strand; PAM type: YTN; PAM sequence: CTG
  source 1..20: mol_type = other DNA
cctcccactgggttcaagtg

SEQ ID NO: 17444 - DNA, 20 bp, synthetic construct
  misc_feature 1..20: note = Description of Artificial Sequence: Synthetic oligonucleotide
  misc_feature 1..20: note = Target: ANGPTL4; (+) strand; PAM type: YTN; PAM sequence: CTC
  source 1..20: mol_type = other DNA
ccactgggttcaagtgattc

SEQ ID NO: 17445 - DNA, 20 bp, synthetic construct
  misc_feature 1..20: note = Description of Artificial Sequence: Synthetic oligonucleotide
  misc_feature 1..20: note = Target: ANGPTL4; (+) strand; PAM type: YTN; PAM sequence: CTG
  source 1..20: mol_type = other DNA
ggttcaagtgattctcctgc

SEQ ID NO: 17446 - DNA, 20 bp, synthetic construct
  misc_feature 1..20: note = Description of Artificial Sequence: Synthetic oligonucleotide
  misc_feature 1..20: note = Target: ANGPTL4; (+) strand; PAM type: YTN; PAM sequence: TTC
  source 1..20: mol_type = other DNA
aagtgattctcctgcctcag

SEQ ID NO: 17447 - DNA, 20 bp, synthetic construct
  misc_feature 1..20: note = Description of Artificial Sequence: Synthetic oligonucleotide
  misc_feature 1..20: note = Target: ANGPTL4; (+) strand; PAM type: YTN; PAM sequence: TTC
  source 1..20: mol_type = other DNA
tcctgcctcagcctctcaag

SEQ ID NO: 17448 - DNA, 20 bp, synthetic construct
  misc_feature 1..20: note = Description of Artificial Sequence: Synthetic oligonucleotide
  misc_feature 1..20: note = Target: ANGPTL4; (+) strand; PAM type: YTN; PAM sequence: CTC
  source 1..20: mol_type = other DNA
ctgcctcagcctctcaagta

SEQ ID NO: 17449 - DNA, 20 bp, synthetic construct
  misc_feature 1..20: note = Description of Artificial Sequence: Synthetic oligonucleotide
  misc_feature 1..20: note = Target: ANGPTL4; (+) strand; PAM type: YTN; PAM sequence: CTG
  source 1..20: mol_type = other DNA
cctcagcctctcaagtagat

SEQ ID NO: 17450 - DNA, 20 bp, synthetic construct
  misc_feature 1..20: note = Description of Artificial Sequence: Synthetic oligonucleotide
  misc_feature 1..20: note = Target: ANGPTL4; (+) strand; PAM type: YTN; PAM sequence: CTC
  source 1..20: mol_type = other DNA
agcctctcaagtagatggga

SEQ ID NO: 17451 - DNA, 20 bp, synthetic construct
  misc_feature 1..20: note = Description of Artificial Sequence: Synthetic oligonucleotide
  misc_feature 1..20: note = Target: ANGPTL4; (+) strand; PAM type: YTN; PAM sequence: CTC
  source 1..20: mol_type = other DNA
tcaagtagatgggattatag

SEQ ID NO: 17452 - DNA, 20 bp, synthetic construct
  misc_feature 1..20: note = Description of Artificial Sequence: Synthetic oligonucleotide
  misc_feature 1..20: note = Target: ANGPTL4; (+) strand; PAM type: YTN; PAM sequence: CTC
  source 1..20: mol_type = other DNA
aagtagatgggattataggc

SEQ ID NO: 17453 - DNA, 20 bp, synthetic construct
  misc_feature 1..20: note = Description of Artificial Sequence: Synthetic oligonucleotide
  misc_feature 1..20: note = Target: ANGPTL4; (+) strand; PAM type: YTN; PAM sequence: TTA
  source 1..20: mol_type = other DNA
taggcgcctaccgccaccac

SEQ ID NO: 17454 - DNA, 20 bp, synthetic construct
  misc_feature 1..20: note = Description of Artificial Sequence: Synthetic oligonucleotide
  misc_feature 1..20: note = Target: ANGPTL4; (+) strand; PAM type: YTN; PAM sequence: CTA
  source 1..20: mol_type = other DNA
ccgccaccacgcccagctaa

SEQ ID NO: 17455 - DNA, 20 bp, synthetic construct
  misc_feature 1..20: note = Description of Artificial Sequence: Synthetic oligonucleotide
  misc_feature 1..20: note = Target: ANGPTL4; (+) strand; PAM type: YTN; PAM sequence: CTA
  source 1..20: mol_type = other DNA
atttttattcatttatcaag

SEQ ID NO: 17456 - DNA, 20 bp, synthetic construct
  misc_feature 1..20: note = Description of Artificial Sequence: Synthetic oligonucleotide
  misc_feature 1..20: note = Target: ANGPTL4; (+) strand; PAM type: YTN; PAM sequence: TTT
  source 1..20: mol_type = other DNA
ttattcatttatcaagtctt

SEQ ID NO: 17457 - DNA, 20 bp, synthetic construct
  misc_feature 1..20: note = Description of Artificial Sequence: Synthetic oligonucleotide
  misc_feature 1..20: note = Target: ANGPTL4; (+) strand; PAM type: YTN; PAM sequence: TTT
  source 1..20: mol_type = other DNA
tattcatttatcaagtcttt

SEQ ID NO: 17458 - DNA, 20 bp, synthetic construct
  misc_feature 1..20: note = Description of Artificial Sequence: Synthetic oligonucleotide
  misc_feature 1..20: note = Target: ANGPTL4; (+) strand; PAM type: YTN; PAM sequence: TTT
  source 1..20: mol_type = other DNA
attcatttatcaagtctttt

SEQ ID NO: 17459 - DNA, 20 bp, synthetic construct
  misc_feature 1..20: note = Description of Artificial Sequence: Synthetic oligonucleotide
  misc_feature 1..20: note = Target: ANGPTL4; (+) strand; PAM type: YTN; PAM sequence: TTA
  source 1..20: mol_type = other DNA
ttcatttatcaagtcttttt

SEQ ID NO: 17460 - DNA, 20 bp, synthetic construct
  misc_feature 1..20: note = Description of Artificial Sequence: Synthetic oligonucleotide
  misc_feature 1..20: note = Target: ANGPTL4; (+) strand; PAM type: YTN; PAM sequence: TTC
  source 1..20: mol_type = other DNA
atttatcaagtctttttttt

SEQ ID NO: 17461 - DNA, 20 bp, synthetic construct
  misc_feature 1..20: note = Description of Artificial Sequence: Synthetic oligonucleotide
  misc_feature 1..20: note = Target: ANGPTL4; (+) strand; PAM type: YTN; PAM sequence: TTT
  source 1..20: mol_type = other DNA
atcaagtctttttttttttt

SEQ ID NO: 17462 - DNA, 20 bp, synthetic construct
  misc_feature 1..20: note = Description of Artificial Sequence: Synthetic oligonucleotide
  misc_feature 1..20: note = Target: ANGPTL4; (+) strand; PAM type: YTN; PAM sequence: TTA
  source 1..20: mol_type = other DNA
tcaagtcttttttttttttg

SEQ ID NO: 17463 - DNA, 20 bp, synthetic construct
  misc_feature 1..20: note = Description of Artificial Sequence: Synthetic oligonucleotide
  misc_feature 1..20: note = Target: ANGPTL4; (+) strand; PAM type: YTN; PAM sequence: CTT
  source 1..20: mol_type = other DNA
ttttttttttgagacagagt

SEQ ID NO: 17464 - DNA, 20 bp, synthetic construct
  misc_feature 1..20: note = Description of Artificial Sequence: Synthetic oligonucleotide
  misc_feature 1..20: note = Target: ANGPTL4; (+) strand; PAM type: YTN; PAM sequence: TTT
  source 1..20: mol_type = other DNA
tttttttttgagacagagtc

SEQ ID NO: 17465 - DNA, 20 bp, synthetic construct
  misc_feature 1..20: note = Description of Artificial Sequence: Synthetic oligonucleotide
  misc_feature 1..20: note = Target: ANGPTL4; (+) strand; PAM type: YTN; PAM sequence: TTT
  source 1..20: mol_type = other DNA
ttttttttgagacagagtct

SEQ ID NO: 17466 - DNA, 20 bp, synthetic construct
  misc_feature 1..20: note = Description of Artificial Sequence: Synthetic oligonucleotide
  misc_feature 1..20: note = Target: ANGPTL4; (+) strand; PAM type: YTN; PAM sequence: TTT
  source 1..20: mol_type = other DNA
tttttttgagacagagtctc

SEQ ID NO: 17467 - DNA, 20 bp, synthetic construct
  misc_feature 1..20: note = Description of Artificial Sequence: Synthetic oligonucleotide
  misc_feature 1..20: note = Target: ANGPTL4; (+) strand; PAM type: YTN; PAM sequence: TTT
  source 1..20: mol_type = other DNA
ttttttgagacagagtctca

SEQ ID NO: 17468 - DNA, 20 bp, synthetic construct
  misc_feature 1..20: note = Description of Artificial Sequence: Synthetic oligonucleotide
  misc_feature 1..20: note = Target: ANGPTL4; (+) strand; PAM type: YTN; PAM sequence: TTT
  source 1..20: mol_type = other DNA
tttttgagacagagtctcac

SEQ ID NO: 17469 - DNA, 20 bp, synthetic construct
  misc_feature 1..20: note = Description of Artificial Sequence: Synthetic oligonucleotide
  misc_feature 1..20: note = Target: ANGPTL4; (+) strand; PAM type: YTN; PAM sequence: TTT
  source 1..20: mol_type = other DNA
ttttgagacagagtctcact

SEQ ID NO: 17470 - DNA, 20 bp, synthetic construct
  misc_feature 1..20: note = Description of Artificial Sequence: Synthetic oligonucleotide
  misc_feature 1..20: note = Target: ANGPTL4; (+) strand; PAM type: YTN; PAM sequence: TTT
  source 1..20: mol_type = other DNA
tttgagacagagtctcactc

SEQ ID NO: 17471 - DNA, 20 bp, synthetic construct
  misc_feature 1..20: note = Description of Artificial Sequence: Synthetic oligonucleotide
  misc_feature 1..20: note = Target: ANGPTL4; (+) strand; PAM type: YTN; PAM sequence: TTT
  source 1..20: mol_type = other DNA
ttgagacagagtctcactct

SEQ ID NO: 17472 - DNA, 20 bp, synthetic construct
  misc_feature 1..20: note = Description of Artificial Sequence: Synthetic oligonucleotide
  misc_feature 1..20: note = Target: ANGPTL4; (+) strand; PAM type: YTN; PAM sequence: TTT
  source 1..20: mol_type = other DNA
tgagacagagtctcactctg

SEQ ID NO: 17473 - DNA, 20 bp, synthetic construct
  misc_feature 1..20: note = Description of Artificial Sequence: Synthetic oligonucleotide
  misc_feature 1..20: note = Target: ANGPTL4; (+) strand; PAM type: YTN; PAM sequence: TTT
  source 1..20: mol_type = other DNA
gagacagagtctcactctgt

SEQ ID NO: 17474 - DNA, 20 bp, synthetic construct
  misc_feature 1..20: note = Description of Artificial Sequence: Synthetic oligonucleotide
  misc_feature 1..20: note = Target: ANGPTL4; (+) strand; PAM type: YTN; PAM sequence: TTG
  source 1..20: mol_type = other DNA
agacagagtctcactctgtc

SEQ ID NO: 17475 - DNA, 20 bp, synthetic construct
  misc_feature 1..20: note = Description of Artificial Sequence: Synthetic oligonucleotide
  misc_feature 1..20: note = Target: ANGPTL4; (+) strand; PAM type: YTN; PAM sequence: CTC
  source 1..20: mol_type = other DNA
actctgtcacccaggttgga

SEQ ID NO: 17476 - DNA, 20 bp, synthetic construct
  misc_feature 1..20: note = Description of Artificial Sequence: Synthetic oligonucleotide
  misc_feature 1..20: note = Target: ANGPTL4; (+) strand; PAM type: YTN; PAM sequence: CTC
  source 1..20: mol_type = other DNA
tgtcacccaggttggagtgc

SEQ ID NO: 17477 - DNA, 20 bp, synthetic construct
  misc_feature 1..20: note = Description of Artificial Sequence: Synthetic oligonucleotide
  misc_feature 1..20: note = Target: ANGPTL4; (+) strand; PAM type: YTN; PAM sequence: CTG
  source 1..20: mol_type = other DNA
tcacccaggttggagtgcaa

SEQ ID NO: 17478 - DNA, 20 bp, synthetic construct
  misc_feature 1..20: note = Description of Artificial Sequence: Synthetic oligonucleotide
  misc_feature 1..20: note = Target: ANGPTL4; (+) strand; PAM type: YTN; PAM sequence: TTG
  source 1..20: mol_type = other DNA
gagtgcaatggttcaacctc

SEQ ID NO: 17479 - DNA, 20 bp, synthetic construct
  misc_feature 1..20: note = Description of Artificial Sequence: Synthetic oligonucleotide
  misc_feature 1..20: note = Target: ANGPTL4; (+) strand; PAM type: YTN; PAM sequence: TTC
  source 1..20: mol_type = other DNA
aacctcagctgactgcaacc

SEQ ID NO: 17480 - DNA, 20 bp, synthetic construct
  misc_feature 1..20: note = Description of Artificial Sequence: Synthetic oligonucleotide
  misc_feature 1..20: note = Target: ANGPTL4; (+) strand; PAM type: YTN; PAM sequence: CTC
  source 1..20: mol_type = other DNA
agctgactgcaacctctgcc

SEQ ID NO: 17481 - DNA, 20 bp, synthetic construct
  misc_feature 1..20: note = Description of Artificial Sequence: Synthetic oligonucleotide
  misc_feature 1..20: note = Target: ANGPTL4; (+) strand; PAM type: YTN; PAM sequence: CTG
  source 1..20: mol_type = other DNA
actgcaacctctgcctcccg

SEQ ID NO: 17482 - DNA, 20 bp, synthetic construct
  misc_feature 1..20: note = Description of Artificial Sequence: Synthetic oligonucleotide
  misc_feature 1..20: note = Target: ANGPTL4; (+) strand; PAM type: YTN; PAM sequence: CTG
  source 1..20: mol_type = other DNA
caacctctgcctcccgggtt

SEQ ID NO: 17483 - DNA, 20 bp, synthetic construct
  misc_feature 1..20: note = Description of Artificial Sequence: Synthetic oligonucleotide
  misc_feature 1..20: note = Target: ANGPTL4; (+) strand; PAM type: YTN; PAM sequence: CTC
  source 1..20: mol_type = other DNA
tgcctcccgggttcaagtga

SEQ ID NO: 17484 - DNA, 20 bp, synthetic construct
  misc_feature 1..20: note = Description of Artificial Sequence: Synthetic oligonucleotide
  misc_feature 1..20: note = Target: ANGPTL4; (+) strand; PAM type: YTN; PAM sequence: CTG
  source 1..20: mol_type = other DNA
cctcccgggttcaagtgatt

SEQ ID NO: 17485 - DNA, 20 bp, synthetic construct
  misc_feature 1..20: note = Description of Artificial Sequence: Synthetic oligonucleotide
  misc_feature 1..20: note = Target: ANGPTL4; (+) strand; PAM type: YTN; PAM sequence: CTC
  source 1..20: mol_type = other DNA
ccgggttcaagtgattctcc

SEQ ID NO: 17486 - DNA, 20 bp, synthetic construct
  misc_feature 1..20: note = Description of Artificial Sequence: Synthetic oligonucleotide
  misc_feature 1..20: note = Target: ANGPTL4; (+) strand; PAM type: YTN; PAM sequence: TTC
  source 1..20: mol_type = other DNA
aagtgattctcctgcctctg

SEQ ID NO: 17487 - DNA, 20 bp, synthetic construct
  misc_feature 1..20: note = Description of Artificial Sequence: Synthetic oligonucleotide
  misc_feature 1..20: note = Target: ANGPTL4; (+) strand; PAM type: YTN; PAM sequence: TTC
  source 1..20: mol_type = other DNA
tcctgcctctgcctcctaag

SEQ ID NO: 17488 - DNA, 20 bp, synthetic construct
  misc_feature 1..20: note = Description of Artificial Sequence: Synthetic oligonucleotide
  misc_feature 1..20: note = Target: ANGPTL4; (+) strand; PAM type: YTN; PAM sequence: CTC
  source 1..20: mol_type = other DNA
ctgcctctgcctcctaagga

SEQ ID NO: 17489 - DNA, 20 bp, synthetic construct
  misc_feature 1..20: note = Description of Artificial Sequence: Synthetic oligonucleotide
  misc_feature 1..20: note = Target: ANGPTL4; (+) strand; PAM type: YTN; PAM sequence: CTG
  source 1..20: mol_type = other DNA
cctctgcctcctaaggagct

SEQ ID NO: 17490 - DNA, 20 bp, synthetic construct
  misc_feature 1..20: note = Description of Artificial Sequence: Synthetic oligonucleotide
  misc_feature 1..20: note = Target: ANGPTL4; (+) strand; PAM type: YTN; PAM sequence: CTC
  source 1..20: mol_type = other DNA
tgcctcctaaggagctggga

SEQ ID NO: 17491 - DNA, 20 bp, synthetic construct
  misc_feature 1..20: note = Description of Artificial Sequence: Synthetic oligonucleotide
  misc_feature 1..20: note = Target: ANGPTL4; (+) strand; PAM type: YTN; PAM sequence: CTG
  source 1..20: mol_type = other DNA
cctcctaaggagctgggatt

SEQ ID NO: 17492 - DNA, 20 bp, synthetic construct
  misc_feature 1..20: note = Description of Artificial Sequence: Synthetic oligonucleotide
  misc_feature 1..20: note = Target: ANGPTL4; (+) strand; PAM type: YTN; PAM sequence: CTC
  source 1..20: mol_type = other DNA
ctaaggagctgggattactg

SEQ ID NO: 17493 - DNA, 20 bp, synthetic construct
  misc_feature 1..20: note = Description of Artificial Sequence: Synthetic oligonucleotide
  misc_feature 1..20: note = Target: ANGPTL4; (+) strand; PAM type: YTN; PAM sequence: CTA
  source 1..20: mol_type = other DNA
aggagctgggattactggcg

SEQ ID NO: 17494 - DNA, 20 bp, synthetic construct
  misc_feature 1..20: note = Description of Artificial Sequence: Synthetic oligonucleotide
  misc_feature 1..20: note = Target: ANGPTL4; (+) strand; PAM type: YTN; PAM sequence: CTG
  source 1..20: mol_type = other DNA
ggattactggcgtccaccat

SEQ ID NO: 17495 - DNA, 20 bp, synthetic construct
  misc_feature 1..20: note = Description of Artificial Sequence: Synthetic oligonucleotide
  misc_feature 1..20: note = Target: ANGPTL4; (+) strand; PAM type: YTN; PAM sequence: TTA
  source 1..20: mol_type = other DNA
ctggcgtccaccatcacacc

SEQ ID NO: 17496 - DNA, 20 bp, synthetic construct
  misc_feature 1..20: note = Description of Artificial Sequence: Synthetic oligonucleotide
  misc_feature 1..20: note = Target: ANGPTL4; (+) strand; PAM type: YTN; PAM sequence: CTG
  source 1..20: mol_type = other DNA
gcgtccaccatcacacccag

SEQ ID NO: 17497 - DNA, 20 bp, synthetic construct
  misc_feature 1..20: note = Description of Artificial Sequence: Synthetic oligonucleotide
  misc_feature 1..20: note = Target: ANGPTL4; (+) strand; PAM type: YTN; PAM sequence: CTA
  source 1..20: mol_type = other DNA
atctttgtatgttttactag

SEQ ID NO: 17498 - DNA, 20 bp, synthetic construct
  misc_feature 1..20: note = Description of Artificial Sequence: Synthetic oligonucleotide
  misc_feature 1..20: note = Target: ANGPTL4; (+) strand; PAM type: YTN; PAM sequence: CTT
  source 1..20: mol_type = other DNA
tgtatgttttactagagatg

SEQ ID NO: 17499 - DNA, 20 bp, synthetic construct
  misc_feature 1..20: note = Description of Artificial Sequence: Synthetic oligonucleotide
  misc_feature 1..20: note = Target: ANGPTL4; (+) strand; PAM type: YTN; PAM sequence: TTT
  source 1..20: mol_type = other DNA
gtatgttttactagagatgg

SEQ ID NO: 17500 - DNA, 20 bp, synthetic construct
  misc_feature 1..20: note = Description of Artificial Sequence: Synthetic oligonucleotide
  misc_feature 1..20: note = Target: ANGPTL4; (+) strand; PAM type: YTN; PAM sequence: TTG
  source 1..20: mol_type = other DNA
tatgttttactagagatggg

SEQ ID NO: 17501 - DNA, 20 bp, synthetic construct
  misc_feature 1..20: note = Description of Artificial Sequence: Synthetic oligonucleotide
  misc_feature 1..20: note = Target: ANGPTL4; (+) strand; PAM type: YTN; PAM sequence: TTT
  source 1..20: mol_type = other DNA
tactagagatggggtttggc

SEQ ID NO: 17502 - DNA, 20 bp, synthetic construct
  misc_feature 1..20: note = Description of Artificial Sequence: Synthetic oligonucleotide
  misc_feature 1..20: note = Target: ANGPTL4; (+) strand; PAM type: YTN; PAM sequence: TTT
  source 1..20: mol_type = other DNA
actagagatggggtttggcc

SEQ ID NO: 17503 - DNA, 20 bp, synthetic construct
  misc_feature 1..20: note = Description of Artificial Sequence: Synthetic oligonucleotide
  misc_feature 1..20: note = Target: ANGPTL4; (+) strand; PAM type: YTN; PAM sequence: TTA
  source 1..20: mol_type = other DNA
ctagagatggggtttggcca

SEQ ID NO: 17504 - DNA, 20 bp, synthetic construct
  misc_feature 1..20: note = Description of Artificial Sequence: Synthetic oligonucleotide
  misc_feature 1..20: note = Target: ANGPTL4; (+) strand; PAM type: YTN; PAM sequence: CTA
  source 1..20: mol_type = other DNA
gagatggggtttggccatgt

SEQ ID NO: 17505 - DNA, 20 bp, synthetic construct
  misc_feature 1..20: note = Description of Artificial Sequence: Synthetic oligonucleotide
  misc_feature 1..20: note = Target: ANGPTL4; (+) strand; PAM type: YTN; PAM sequence: TTT
  source 1..20: mol_type = other DNA
ggccatgttgaccaggctgg

SEQ ID NO: 17506 - DNA, 20 bp, synthetic construct
  misc_feature 1..20: note = Description of Artificial Sequence: Synthetic oligonucleotide
  misc_feature 1..20: note = Target: ANGPTL4; (+) strand; PAM type: YTN; PAM sequence: TTG
  source 1..20: mol_type = other DNA
gccatgttgaccaggctggt

SEQ ID NO: 17507 - DNA, 20 bp, synthetic construct
  misc_feature 1..20: note = Description of Artificial Sequence: Synthetic oligonucleotide
  misc_feature 1..20: note = Target: ANGPTL4; (+) strand; PAM type: YTN; PAM sequence: TTG
  source 1..20: mol_type = other DNA
accaggctggtctcaaactc

SEQ ID NO: 17508 - DNA, 20 bp, synthetic construct
  misc_feature 1..20: note = Description of Artificial Sequence: Synthetic oligonucleotide
  misc_feature 1..20: note = Target: ANGPTL4; (+) strand; PAM type: YTN; PAM sequence: CTG
  source 1..20: mol_type = other DNA
gtctcaaactcctgaccgat

SEQ ID NO: 17509 - DNA, 20 bp, synthetic construct
  misc_feature 1..20: note = Description of Artificial Sequence: Synthetic oligonucleotide
  misc_feature 1..20: note = Target: ANGPTL4; (+) strand; PAM type: YTN; PAM sequence: CTC
  source 1..20: mol_type = other DNA
aaactcctgaccgatccgcc

SEQ ID NO: 17510 - DNA, 20 bp, synthetic construct
  misc_feature 1..20: note = Description of Artificial Sequence: Synthetic oligonucleotide
  misc_feature 1..20: note = Target: ANGPTL4; (+) strand; PAM type: YTN; PAM sequence: CTC
  source 1..20: mol_type = other DNA
ctgaccgatccgcccgcctc

SEQ ID NO: 17511 - DNA, 20 bp, synthetic construct
  misc_feature 1..20: note = Description of Artificial Sequence: Synthetic oligonucleotide
  misc_feature 1..20: note = Target: ANGPTL4; (+) strand; PAM type: YTN; PAM sequence: CTG
  source 1..20: mol_type = other DNA
accgatccgcccgcctccca

SEQ ID NO: 17512 - DNA, 20 bp, synthetic construct
  misc_feature 1..20: note = Description of Artificial Sequence: Synthetic oligonucleotide
  misc_feature 1..20: note = Target: ANGPTL4; (+) strand; PAM type: YTN; PAM sequence: CTC
  source 1..20: mol_type = other DNA
ccaaagtgctggattacagg

SEQ ID NO: 17513 - DNA, 20 bp, synthetic construct
  misc_feature 1..20: note = Description of Artificial Sequence: Synthetic oligonucleotide
  misc_feature 1..20: note = Target: ANGPTL4; (+) strand; PAM type: YTN; PAM sequence: CTG
  source 1..20: mol_type = other DNA
gattacaggcatgaaccact

SEQ ID NO: 17514 - DNA, 20 bp, synthetic construct
  misc_feature 1..20: note = Description of Artificial Sequence: Synthetic oligonucleotide
  misc_feature 1..20: note = Target: ANGPTL4; (+) strand; PAM type: YTN; PAM sequence: TTA
  source 1..20: mol_type = other DNA
caggcatgaaccactgcgcc

SEQ ID NO: 17515 - DNA, 20 bp, synthetic construct
  misc_feature 1..20: note = Description of Artificial Sequence: Synthetic oligonucleotide
  misc_feature 1..20: note = Target: ANGPTL4; (+) strand; PAM type: YTN; PAM sequence: CTG
  source 1..20: mol_type = other DNA
cgcccggcccattcctcaag

SEQ ID NO: 17516 - DNA, 20 bp, synthetic construct
  misc_feature 1..20: note = Description of Artificial Sequence: Synthetic oligonucleotide
  misc_feature 1..20: note = Target: ANGPTL4; (+) strand; PAM type: YTN; PAM sequence: TTC
  source 1..20: mol_type = other DNA
ctcaagtctttattgagcag

SEQ ID NO: 17517 - DNA, 20 bp, synthetic construct
  misc_feature 1..20: note = Description of Artificial Sequence: Synthetic oligonucleotide
  misc_feature 1..20: note = Target: ANGPTL4; (+) strand; PAM type: YTN; PAM sequence: CTC
  source 1..20: mol_type = other DNA
aagtctttattgagcagctg

SEQ ID NO: 17518 - DNA, 20 bp, synthetic construct
  misc_feature 1..20: note = Description of Artificial Sequence: Synthetic oligonucleotide
  misc_feature 1..20: note = Target: ANGPTL4; (+) strand; PAM type: YTN; PAM sequence: CTT
  source 1..20: mol_type = other DNA
tattgagcagctgctatgcg

SEQ ID NO: 17519 - DNA, 20 bp, synthetic construct
  misc_feature 1..20: note = Description of Artificial Sequence: Synthetic oligonucleotide
  misc_feature 1..20: note = Target: ANGPTL4; (+) strand; PAM type: YTN; PAM sequence: TTT
  source 1..20: mol_type = other DNA
attgagcagctgctatgcgc

SEQ ID NO: 17520 - DNA, 20 bp, synthetic construct
  misc_feature 1..20: note = Description of Artificial Sequence: Synthetic oligonucleotide
  misc_feature 1..20: note = Target: ANGPTL4; (+) strand; PAM type: YTN; PAM sequence: TTA
  source 1..20: mol_type = other DNA
ttgagcagctgctatgcgct

SEQ ID NO: 17521 - DNA, 20 bp, synthetic construct
  misc_feature 1..20: note = Description of Artificial Sequence: Synthetic oligonucleotide
  misc_feature 1..20: note = Target: ANGPTL4; (+) strand; PAM type: YTN; PAM sequence: TTG
  source 1..20: mol_type = other DNA
agcagctgctatgcgctggg

SEQ ID NO: 17522 - DNA, 20 bp, synthetic construct
  misc_feature 1..20: note = Description of Artificial Sequence: Synthetic oligonucleotide
  misc_feature 1..20: note = Target: ANGPTL4; (+) strand; PAM type: YTN; PAM sequence: CTG
  source 1..20: mol_type = other DNA
ctatgcgctggggcctgcgt

SEQ ID NO: 17523 - DNA, 20 bp, synthetic construct
  misc_feature 1..20: note = Description of Artificial Sequence: Synthetic oligonucleotide
  misc_feature 1..20: note = Target: ANGPTL4; (+) strand; PAM type: YTN; PAM sequence: CTA
  source 1..20: mol_type = other DNA
tgcgctggggcctgcgtgga

SEQ ID NO: 17524 - DNA, 20 bp, synthetic construct
  misc_feature 1..20: note = Description of Artificial Sequence: Synthetic oligonucleotide
  misc_feature 1..20: note = Target: ANGPTL4; (+) strand; PAM type: YTN; PAM sequence: CTG
  source 1..20: mol_type = other DNA
gggcctgcgtggatgctggt

SEQ ID NO: 17525 - DNA, 20 bp, synthetic construct
  misc_feature 1..20: note = Description of Artificial Sequence: Synthetic oligonucleotide
  misc_feature 1..20: note = Target: ANGPTL4; (+) strand; PAM type: YTN; PAM sequence: CTG
  source 1..20: mol_type = other DNA
cgtggatgctggtgccaggc

SEQ ID NO: 17526 - DNA, 20 bp, synthetic construct
  misc_feature 1..20: note = Description of Artificial Sequence: Synthetic oligonucleotide
  misc_feature 1..20: note = Target: ANGPTL4; (+) strand; PAM type: YTN; PAM sequence: CTG
  source 1..20: mol_type = other DNA
gtgccaggctgtgggcagag

SEQ ID NO: 17527 - DNA, 20 bp, synthetic construct
  misc_feature 1..20: note = Description of Artificial Sequence: Synthetic oligonucleotide
  misc_feature 1..20: note = Target: ANGPTL4; (+) strand; PAM type: YTN; PAM sequence: CTG
  source 1..20: mol_type = other DNA
tgggcagagctgctccttgt

SEQ ID NO: 17528 - DNA, 20 bp, synthetic construct
  misc_feature 1..20: note = Description of Artificial Sequence: Synthetic oligonucleotide
  misc_feature 1..20: note = Target: ANGPTL4; (+) strand; PAM type: YTN; PAM sequence: CTG
  source 1..20: mol_type = other DNA
ctccttgtccccagcctcat

SEQ ID NO: 17529 - DNA, 20 bp, synthetic construct
  misc_feature 1..20: note = Description of Artificial Sequence: Synthetic oligonucleotide
  misc_feature 1..20: note = Target: ANGPTL4; (+) strand; PAM type: YTN; PAM sequence: CTC
  source 1..20: mol_type = other DNA
cttgtccccagcctcatgga

SEQ ID NO: 17530 - DNA, 20 bp, synthetic construct
  misc_feature 1..20: note = Description of Artificial Sequence: Synthetic oligonucleotide
  misc_feature 1..20: note = Target: ANGPTL4; (+) strand; PAM type: YTN; PAM sequence: CTT
  source 1..20: mol_type = other DNA
gtccccagcctcatggagcc

SEQ ID NO: 17531 - DNA, 20 bp, synthetic construct
  misc_feature 1..20: note = Description of Artificial Sequence: Synthetic oligonucleotide
  misc_feature 1..20: note = Target: ANGPTL4; (+) strand; PAM type: YTN; PAM sequence: TTG
  source 1..20: mol_type = other DNA
tccccagcctcatggagcct

SEQ ID NO: 17532 - DNA, 20 bp, synthetic construct
  misc_feature 1..20: note = Description of Artificial Sequence: Synthetic oligonucleotide
  misc_feature 1..20: note = Target: ANGPTL4; (+) strand; PAM type: YTN; PAM sequence: CTC
  source 1..20: mol_type = other DNA
atggagcctccattgagtca

SEQ ID NO: 17533 - DNA, 20 bp, synthetic construct
  misc_feature 1..20: note = Description of Artificial Sequence: Synthetic oligonucleotide
  misc_feature 1..20: note = Target: ANGPTL4; (+) strand; PAM type: YTN; PAM sequence: CTC
  source 1..20: mol_type = other DNA
cattgagtcagaggagagac

SEQ ID NO: 17534 - DNA, 20 bp, synthetic construct
  misc_feature 1..20: note = Description of Artificial Sequence: Synthetic oligonucleotide
  misc_feature 1..20: note = Target: ANGPTL4; (+) strand; PAM type: YTN; PAM sequence: TTG
  source 1..20: mol_type = other DNA
agtcagaggagagaccatta

SEQ ID NO: 17535 - DNA, 20 bp, synthetic construct
  misc_feature 1..20: note = Description of Artificial Sequence: Synthetic oligonucleotide
  misc_feature 1..20: note = Target: ANGPTL4; (+) strand; PAM type: YTN; PAM sequence: TTA
  source 1..20: mol_type = other DNA
gatgacctcagtgtccagga

SEQ ID NO: 17536 - DNA, 20 bp, synthetic construct
  misc_feature 1..20: note = Description of Artificial Sequence: Synthetic oligonucleotide
  misc_feature 1..20: note = Target: ANGPTL4; (+) strand; PAM type: YTN; PAM sequence: CTC
  source 1..20: mol_type = other DNA
agtgtccaggagtgggaagt

SEQ ID NO: 17537 - DNA, 20 bp, synthetic construct
  misc_feature 1..20: note = Description of Artificial Sequence: Synthetic oligonucleotide
  misc_feature 1..20: note = Target: ANGPTL4; (+) strand; PAM type: YTN; PAM sequence: CTT
  source 1..20: mol_type = other DNA
gctcaattcccatttggggt

SEQ ID NO: 17538 - DNA, 20 bp, synthetic construct
  misc_feature 1..20: note = Description of Artificial Sequence: Synthetic oligonucleotide
  misc_feature 1..20: note = Target: ANGPTL4; (+) strand; PAM type: YTN; PAM sequence: TTG
  source 1..20: mol_type = other DNA
ctcaattcccatttggggtg

SEQ ID NO: 17539 - DNA, 20 bp, synthetic construct
  misc_feature 1..20: note = Description of Artificial Sequence: Synthetic oligonucleotide
  misc_feature 1..20: note = Target: ANGPTL4; (+) strand; PAM type: YTN; PAM sequence: CTC
  source 1..20: mol_type = other DNA
aattcccatttggggtgttc

SEQ ID NO: 17540 - DNA, 20 bp, synthetic construct
  misc_feature 1..20: note = Description of Artificial Sequence: Synthetic oligonucleotide
  misc_feature 1..20: note = Target: ANGPTL4; (+) strand; PAM type: YTN; PAM sequence: TTC
  source 1..20: mol_type = other DNA
ccatttggggtgttctggcc

SEQ ID NO: 17541 - DNA, 20 bp, synthetic construct
  misc_feature 1..20: note = Description of Artificial Sequence: Synthetic oligonucleotide
  misc_feature 1..20: note = Target: ANGPTL4; (+) strand; PAM type: YTN; PAM sequence: TTT
  source 1..20: mol_type = other DNA
ggggtgttctggcctggtct

SEQ ID NO: 17542 - DNA, 20 bp, synthetic construct
  misc_feature 1..20: note = Description of Artificial Sequence: Synthetic oligonucleotide
  misc_feature 1..20: note = Target: ANGPTL4; (+) strand; PAM type: YTN; PAM sequence: TTG
  source 1..20: mol_type = other DNA
gggtgttctggcctggtctg

SEQ ID NO: 17543 - DNA, 20 bp, synthetic construct
  misc_feature 1..20: note = Description of Artificial Sequence: Synthetic oligonucleotide
  misc_feature 1..20: note = Target: ANGPTL4; (+) strand; PAM type: YTN; PAM sequence: TTC
  source 1..20: mol_type = other DNA
tggcctggtctgggggtgag

SEQ ID NO: 17544 - DNA, 20 bp, synthetic construct
  misc_feature 1..20: note = Description of Artificial Sequence: Synthetic oligonucleotide
  misc_feature 1..20: note = Target: ANGPTL4; (+) strand; PAM type: YTN; PAM sequence: CTG
  source 1..20: mol_type = other DNA
gcctggtctgggggtgaggc

SEQ ID NO: 17545 - DNA, 20 bp, synthetic construct
  misc_feature 1..20: note = Description of Artificial Sequence: Synthetic oligonucleotide
  misc_feature 1..20: note = Target: ANGPTL4; (+) strand; PAM type: YTN; PAM sequence: CTG
  source 1..20: mol_type = other DNA
gtctgggggtgaggcaaggc

SEQ ID NO: 17546 - DNA, 20 bp, synthetic construct
  misc_feature 1..20: note = Description of Artificial Sequence: Synthetic oligonucleotide
  misc_feature 1..20: note = Target: ANGPTL4; (+) strand; PAM type: YTN; PAM sequence: CTG
  source 1..20: mol_type = other DNA
ggggtgaggcaaggcagggt

SEQ ID NO: 17547 - DNA, 20 bp, synthetic construct
  misc_feature 1..20: note = Description of Artificial Sequence: Synthetic oligonucleotide
  misc_feature 1..20: note = Target: ANGPTL4; (+) strand; PAM type: YTN; PAM sequence: CTT
  source 1..20: mol_type = other DNA
ccagaagctgggacccagag

SEQ ID NO: 17548 - DNA, 20 bp, synthetic construct
  misc_feature 1..20: note = Description of Artificial Sequence: Synthetic oligonucleotide
  misc_feature 1..20: note = Target: ANGPTL4; (+) strand; PAM type: YTN; PAM sequence: TTC
  source 1..20: mol_type = other DNA
cagaagctgggacccagaga

SEQ ID NO: 17549 - DNA, 20 bp, synthetic construct
  misc_feature 1..20: note = Description of Artificial Sequence: Synthetic oligonucleotide
  misc_feature 1..20: note = Target: ANGPTL4; (+) strand; PAM type: YTN; PAM sequence: CTG
  source 1..20: mol_type = other DNA
ggacccagagagagaagtga

SEQ ID NO: 17550 - DNA, 20 bp, synthetic construct
  misc_feature 1..20: note = Description of Artificial Sequence: Synthetic oligonucleotide
  misc_feature 1..20: note = Target: ANGPTL4; (+) strand; PAM type: YTN; PAM sequence: TTC
  source 1..20: mol_type = other DNA
acacctgtaatcccagcact

SEQ ID NO: 17551 - DNA, 20 bp, synthetic construct
  misc_feature 1..20: note = Description of Artificial Sequence: Synthetic oligonucleotide
  misc_feature 1..20: note = Target: ANGPTL4; (+) strand; PAM type: YTN; PAM sequence: CTG
  source 1..20: mol_type = other DNA
taatcccagcactttgggag

SEQ ID NO: 17552 - DNA, 20 bp, synthetic construct
  misc_feature 1..20: note = Description of Artificial Sequence: Synthetic oligonucleotide
  misc_feature 1..20: note = Target: ANGPTL4; (+) strand; PAM type: YTN; PAM sequence: CTT
  source 1..20: mol_type = other DNA
tgggaggccaaggctggcgg

SEQ ID NO: 17553 - DNA, 20 bp, synthetic construct
  misc_feature 1..20: note = Description of Artificial Sequence: Synthetic oligonucleotide
  misc_feature 1..20: note = Target: ANGPTL4; (+) strand; PAM type: YTN; PAM sequence: TTT
  source 1..20: mol_type = other DNA
gggaggccaaggctggcgga

SEQ ID NO: 17554 - DNA, 20 bp, synthetic construct
  misc_feature 1..20: note = Description of Artificial Sequence: Synthetic oligonucleotide
  misc_feature 1..20: note = Target: ANGPTL4; (+) strand; PAM type: YTN; PAM sequence: TTG
  source 1..20: mol_type = other DNA
ggaggccaaggctggcggat

SEQ ID NO: 17555 - DNA, 20 bp, synthetic construct
  misc_feature 1..20: note = Description of Artificial Sequence: Synthetic oligonucleotide
  misc_feature 1..20: note = Target: ANGPTL4; (+) strand; PAM type: YTN; PAM sequence: CTG
  source 1..20: mol_type = other DNA
gcggatcacgaggtcaggag

SEQ ID NO: 17556 - DNA, 20 bp, synthetic construct
  misc_feature 1..20: note = Description of Artificial Sequence: Synthetic oligonucleotide
  misc_feature 1..20: note = Target: ANGPTL4; (+) strand; PAM type: YTN; PAM sequence: CTG
  source 1..20: mol_type = other DNA
gccaacatggtgaaaccccc

SEQ ID NO: 17557 - DNA, 20 bp, synthetic construct
  misc_feature 1..20: note = Description of Artificial Sequence: Synthetic oligonucleotide
  misc_feature 1..20: note = Target: ANGPTL4; (+) strand; PAM type: YTN; PAM sequence: CTC
  source 1..20: mol_type = other DNA
tacaaataatgcaaaaacta

SEQ ID NO: 17558 - DNA, 20 bp, synthetic construct
  misc_feature 1..20: note = Description of Artificial Sequence: Synthetic oligonucleotide
  misc_feature 1..20: note = Target: ANGPTL4; (+) strand; PAM type: YTN; PAM sequence: CTA
  source 1..20: mol_type = other DNA
caaataatgcaaaaactagt

SEQ ID NO: 17559 - DNA, 20 bp, synthetic construct
  misc_feature 1..20: note = Description of Artificial Sequence: Synthetic oligonucleotide
  misc_feature 1..20: note = Target: ANGPTL4; (+) strand; PAM type: YTN; PAM sequence: CTA
  source 1..20: mol_type = other DNA
gtcgggcgtggtggcacatg

SEQ ID NO: 17560 - DNA, 20 bp, synthetic construct
  misc_feature 1..20: note = Description of Artificial Sequence: Synthetic oligonucleotide
  misc_feature 1..20: note = Target: ANGPTL4; (+) strand; PAM type: YTN; PAM sequence: CTG
  source 1..20: mol_type = other DNA
tagtcccagctgctccggag

SEQ ID NO: 17561 - DNA, 20 bp, synthetic construct
  misc_feature 1..20: note = Description of Artificial Sequence: Synthetic oligonucleotide
  misc_feature 1..20: note = Target: ANGPTL4; (+) strand; PAM type: YTN; PAM sequence: CTG
  source 1..20: mol_type = other DNA
ctccggaggctgcggcagaa

SEQ ID NO: 17562 - DNA, 20 bp, synthetic construct
  misc_feature 1..20: note = Description of Artificial Sequence: Synthetic oligonucleotide
  misc_feature 1..20: note = Target: ANGPTL4; (+) strand; PAM type: YTN; PAM sequence: CTC
  source 1..20: mol_type = other DNA
cggaggctgcggcagaattg

SEQ ID NO: 17563 - DNA, 20 bp, synthetic construct
  misc_feature 1..20: note = Description of Artificial Sequence: Synthetic oligonucleotide
  misc_feature 1..20: note = Target: ANGPTL4; (+) strand; PAM type: YTN; PAM sequence: CTG
  source 1..20: mol_type = other DNA
cggcagaattgcttgaacct

SEQ ID NO: 17564 - DNA, 20 bp, synthetic construct
  misc_feature 1..20: note = Description of Artificial Sequence: Synthetic oligonucleotide
  misc_feature 1..20: note = Target: ANGPTL4; (+) strand; PAM type: YTN; PAM sequence: TTG
  source 1..20: mol_type = other DNA
cttgaacctgggaggcggag

SEQ ID NO: 17565 - DNA, 20 bp, synthetic construct
  misc_feature 1..20: note = Description of Artificial Sequence: Synthetic oligonucleotide
  misc_feature 1..20: note = Target: ANGPTL4; (+) strand; PAM type: YTN; PAM sequence: CTT
  source 1..20: mol_type = other DNA
gaacctgggaggcggaggtt

SEQ ID NO: 17566 - DNA, 20 bp, synthetic construct
  misc_feature 1..20: note = Description of Artificial Sequence: Synthetic oligonucleotide
  misc_feature 1..20: note = Target: ANGPTL4; (+) strand; PAM type: YTN; PAM sequence: TTG
  source 1..20: mol_type = other DNA
aacctgggaggcggaggttg

SEQ ID NO: 17567 - DNA, 20 bp, synthetic construct
  misc_feature 1..20: note = Description of Artificial Sequence: Synthetic oligonucleotide
  misc_feature 1..20: note = Target: ANGPTL4; (+) strand; PAM type: YTN; PAM sequence: CTG
  source 1..20: mol_type = other DNA
ggaggcggaggttgcagtga

SEQ ID NO: 17568 - DNA, 20 bp, synthetic construct
  misc_feature 1..20: note = Description of Artificial Sequence: Synthetic oligonucleotide
  misc_feature 1..20: note = Target: ANGPTL4; (+) strand; PAM type: YTN; PAM sequence: TTG
  source 1..20: mol_type = other DNA
cagtgagccaagattgcgcc

SEQ ID NO: 17569 - DNA, 20 bp, synthetic construct
  misc_feature 1..20: note = Description of Artificial Sequence: Synthetic oligonucleotide
  misc_feature 1..20: note = Target: ANGPTL4; (+) strand; PAM type: YTN; PAM sequence: TTG
  source 1..20: mol_type = other DNA
cgccactgcactccagcctg

SEQ ID NO: 17570 - DNA, 20 bp, synthetic construct
  misc_feature 1..20: note = Description of Artificial Sequence: Synthetic oligonucleotide
  misc_feature 1..20: note = Target: ANGPTL4; (+) strand; PAM type: YTN; PAM sequence: CTG
  source 1..20: mol_type = other DNA
cactccagcctggcgacaga

SEQ ID NO: 17571 - DNA, 20 bp, synthetic construct
  misc_feature 1..20: note = Description of Artificial Sequence: Synthetic oligonucleotide
  misc_feature 1..20: note = Target: ANGPTL4; (+) strand; PAM type: YTN; PAM sequence: CTC
  source 1..20: mol_type = other DNA
cagcctggcgacagagcgag

SEQ ID NO: 17572 - DNA, 20 bp, synthetic construct
  misc_feature 1..20: note = Description of Artificial Sequence: Synthetic oligonucleotide
  misc_feature 1..20: note = Target: ANGPTL4; (+) strand; PAM type: YTN; PAM sequence: CTG
  source 1..20: mol_type = other DNA
gcgacagagcgagactccgt

SEQ ID NO: 17573 - DNA, 20 bp, synthetic construct
  misc_feature 1..20: note = Description of Artificial Sequence: Synthetic oligonucleotide
  misc_feature 1..20: note = Target: ANGPTL4; (+) strand; PAM type: YTN; PAM sequence: CTC
  source 1..20: mol_type = other DNA
cgtatcaaaaaacaaaacaa

SEQ ID NO: 17574 - DNA, 20 bp, synthetic construct
  misc_feature 1..20: note = Description of Artificial Sequence: Synthetic oligonucleotide
  misc_feature 1..20: note = Target: ANGPTL4; (+) strand; PAM type: YTN; PAM sequence: CTG
  source 1..20: mol_type = other DNA
tggcaggacggtgtgtggta

SEQ ID NO: 17575 - DNA, 20 bp, synthetic construct
  misc_feature 1..20: note = Description of Artificial Sequence: Synthetic oligonucleotide
  misc_feature 1..20: note = Target: ANGPTL4; (+) strand; PAM type: YTN; PAM sequence: CTG
  source 1..20: mol_type = other DNA
tgtgccagagagggtgtggg

SEQ ID NO: 17576 - DNA, 20 bp, synthetic construct
  misc_feature 1..20: note = Description of Artificial Sequence: Synthetic oligonucleotide
  misc_feature 1..20: note = Target: ANGPTL4; (+) strand; PAM type: YTN; PAM sequence: CTG
  source 1..20: mol_type = other DNA
gtcctccaggtgccttgtgg

SEQ ID NO: 17577 - DNA, 20 bp, synthetic construct
  misc_feature 1..20: note = Description of Artificial Sequence: Synthetic oligonucleotide
  misc_feature 1..20: note = Target: ANGPTL4; (+) strand; PAM type: YTN; PAM sequence: CTC
  source 1..20: mol_type = other DNA
caggtgccttgtggaccatg

SEQ ID NO: 17578 - DNA, 20 bp, synthetic construct
  misc_feature 1..20: note = Description of Artificial Sequence: Synthetic oligonucleotide
  misc_feature 1..20: note = Target: ANGPTL4; (+) strand; PAM type: YTN; PAM sequence: CTT
  source 1..20: mol_type = other DNA
gtggaccatgctgaggaagg

SEQ ID NO: 17579 - DNA, 20 bp, synthetic construct
  misc_feature 1..20: note = Description of Artificial Sequence: Synthetic oligonucleotide
  misc_feature 1..20: note = Target: ANGPTL4; (+) strand; PAM type: YTN; PAM sequence: TTG
  source 1..20: mol_type = other DNA
tggaccatgctgaggaagga

SEQ ID NO: 17580 - DNA, 20 bp, synthetic construct
  misc_feature 1..20: note = Description of Artificial Sequence: Synthetic oligonucleotide
  misc_feature 1..20: note = Target: ANGPTL4; (+) strand; PAM type: YTN; PAM sequence: CTG
  source 1..20: mol_type = other DNA
aggaaggacatagggagcca

SEQ ID NO: 17581 - DNA, 20 bp, synthetic construct
  misc_feature 1..20: note = Description of Artificial Sequence: Synthetic oligonucleotide
  misc_feature 1..20: note = Target: ANGPTL4; (+) strand; PAM type: YTN; PAM sequence: TTA
  source 1..20: mol_type = other DNA
ggcagatggcagagaggtgg

SEQ ID NO: 17582 - DNA, 20 bp, synthetic construct
  misc_feature 1..20: note = Description of Artificial Sequence: Synthetic oligonucleotide
  misc_feature 1..20: note = Target: ANGPTL4; (+) strand; PAM type: YTN; PAM sequence: TTT
  source 1..20: mol_type = other DNA
gccttttacttccctggtca

SEQ ID NO: 17583 - DNA, 20 bp, synthetic construct
  misc_feature 1..20: note = Description of Artificial Sequence: Synthetic oligonucleotide
  misc_feature 1..20: note = Target: ANGPTL4; (+) strand; PAM type: YTN; PAM sequence: TTG
  source 1..20: mol_type = other DNA
ccttttacttccctggtcat

SEQ ID NO: 17584 - DNA, 20 bp, synthetic construct
  misc_feature 1..20: note = Description of Artificial Sequence: Synthetic oligonucleotide
  misc_feature 1..20: note = Target: ANGPTL4; (+) strand; PAM type: YTN; PAM sequence: CTT
  source 1..20: mol_type = other DNA
ttacttccctggtcatccac

SEQ ID NO: 17585 - DNA, 20 bp, synthetic construct
  misc_feature 1..20: note = Description of Artificial Sequence: Synthetic oligonucleotide
  misc_feature 1..20: note = Target: ANGPTL4; (+) strand; PAM type: YTN; PAM sequence: TTT
  source 1..20: mol_type = other DNA
tacttccctggtcatccact

SEQ ID NO: 17586 - DNA, 20 bp, synthetic construct
  misc_feature 1..20: note = Description of Artificial Sequence: Synthetic oligonucleotide
  misc_feature 1..20: note = Target: ANGPTL4; (+) strand; PAM type: YTN; PAM sequence: TTT
  source 1..20: mol_type = other DNA
acttccctggtcatccactg

SEQ ID NO: 17587 - DNA, 20 bp, synthetic construct
  misc_feature 1..20: note = Description of Artificial Sequence: Synthetic oligonucleotide
  misc_feature 1..20: note = Target: ANGPTL4; (+) strand; PAM type: YTN; PAM sequence: TTA
  source 1..20: mol_type = other DNA
cttccctggtcatccactgt

SEQ ID NO: 17588 - DNA, 20 bp, synthetic construct
  misc_feature 1..20: note = Description of Artificial Sequence: Synthetic oligonucleotide
  misc_feature 1..20: note = Target: ANGPTL4; (+) strand; PAM type: YTN; PAM sequence: CTT
  source 1..20: mol_type = other DNA
ccctggtcatccactgttaa

SEQ ID NO: 17589 - DNA, 20 bp, synthetic construct
  misc_feature 1..20: note = Description of Artificial Sequence: Synthetic oligonucleotide
  misc_feature 1..20: note = Target: ANGPTL4; (+) strand; PAM type: YTN; PAM sequence: TTC
  source 1..20: mol_type = other DNA
cctggtcatccactgttaag

SEQ ID NO: 17590 - DNA, 20 bp, synthetic construct
  misc_feature 1..20: note = Description of Artificial Sequence: Synthetic oligonucleotide
  misc_feature 1..20: note = Target: ANGPTL4; (+) strand; PAM type: YTN; PAM sequence: CTG
  source 1..20: mol_type = other DNA
gtcatccactgttaagcccc

SEQ ID NO: 17591 - DNA, 20 bp, synthetic construct
  misc_feature 1..20: note = Description of Artificial Sequence: Synthetic oligonucleotide
  misc_feature 1..20: note = Target: ANGPTL4; (+) strand; PAM type: YTN; PAM sequence: CTG
  source 1..20: mol_type = other DNA
ttaagcccccagatatgcct

SEQ ID NO: 17592 - DNA, 20 bp, synthetic construct
  misc_feature 1..20: note = Description of Artificial Sequence: Synthetic oligonucleotide
  misc_feature 1..20: note = Target: ANGPTL4; (+) strand; PAM type: YTN; PAM sequence: TTA
  source 1..20: mol_type = other DNA
agcccccagatatgcctggc

SEQ ID NO: 17593 - DNA, 20 bp, synthetic construct
  misc_feature 1..20: note = Description of Artificial Sequence: Synthetic oligonucleotide
  misc_feature 1..20: note = Target: ANGPTL4; (+) strand; PAM type: YTN; PAM sequence: CTG
  source 1..20: mol_type = other DNA
gctcctgagaccccccccag

SEQ ID NO: 17594 - DNA, 20 bp, synthetic construct
  misc_feature 1..20: note = Description of Artificial Sequence: Synthetic oligonucleotide
  misc_feature 1..20: note = Target: ANGPTL4; (+) strand; PAM type: YTN; PAM sequence: CTC
  source 1..20: mol_type = other DNA
ctgagaccccccccaggggc

SEQ ID NO: 17595 - DNA, 20 bp, synthetic construct
  misc_feature 1..20: note = Description of Artificial Sequence: Synthetic oligonucleotide
  misc_feature 1..20: note = Target: ANGPTL4; (+) strand; PAM type: YTN; PAM sequence: CTG
  source 1..20: mol_type = other DNA
agaccccccccaggggctgc

SEQ ID NO: 17596 - DNA, 20 bp, synthetic construct
  misc_feature 1..20: note = Description of Artificial Sequence: Synthetic oligonucleotide
  misc_feature 1..20: note = Target: ANGPTL4; (+) strand; PAM type: YTN; PAM sequence: CTG
  source 1..20: mol_type = other DNA
ccctcctgtttcaagtctcc

SEQ ID NO: 17597 - DNA, 20 bp, synthetic construct
  misc_feature 1..20: note = Description of Artificial Sequence: Synthetic oligonucleotide
  misc_feature 1..20: note = Target: ANGPTL4; (+) strand; PAM type: YTN; PAM sequence: CTC
  source 1..20: mol_type = other DNA
ctgtttcaagtctccacttt

SEQ ID NO: 17598 - DNA, 20 bp, synthetic construct
  misc_feature 1..20: note = Description of Artificial Sequence: Synthetic oligonucleotide
  misc_feature 1..20: note = Target: ANGPTL4; (+) strand; PAM type: YTN; PAM sequence: CTG
  source 1..20: mol_type = other DNA
tttcaagtctccactttatc

SEQ ID NO: 17599 - DNA, 20 bp, synthetic construct
  misc_feature 1..20: note = Description of Artificial Sequence: Synthetic oligonucleotide
  misc_feature 1..20: note = Target: ANGPTL4; (+) strand; PAM type: YTN; PAM sequence: TTT
  source 1..20: mol_type = other DNA
caagtctccactttatctcc

SEQ ID NO: 17600 - DNA, 20 bp, synthetic construct
  misc_feature 1..20: note = Description of Artificial Sequence: Synthetic oligonucleotide
  misc_feature 1..20: note = Target: ANGPTL4; (+) strand; PAM type: YTN; PAM sequence: TTC
  source 1..20: mol_type = other DNA
aagtctccactttatctccc

SEQ ID NO: 17601 - DNA, 20 bp, synthetic construct
  misc_feature 1..20: note = Description of Artificial Sequence: Synthetic oligonucleotide
  misc_feature 1..20: note = Target: ANGPTL4; (+) strand; PAM type: YTN; PAM sequence: CTC
  source 1..20: mol_type = other DNA
cactttatctcccttcaggg

SEQ ID NO: 17602 - DNA, 20 bp, synthetic construct
  misc_feature 1..20: note = Description of Artificial Sequence: Synthetic oligonucleotide
  misc_feature 1..20: note = Target: ANGPTL4; (+) strand; PAM type: YTN; PAM sequence: CTT
  source 1..20: mol_type = other DNA
tatctcccttcagggctgcc

SEQ ID NO: 17603 - DNA, 20 bp, synthetic construct
  misc_feature 1..20: note = Description of Artificial Sequence: Synthetic oligonucleotide
  misc_feature 1..20: note = Target: ANGPTL4; (+) strand; PAM type: YTN; PAM sequence: TTT
  source 1..20: mol_type = other DNA
atctcccttcagggctgccc

SEQ ID NO: 17604 - DNA, 20 bp, synthetic construct
  misc_feature 1..20: note = Description of Artificial Sequence: Synthetic oligonucleotide
  misc_feature 1..20: note = Target: ANGPTL4; (+) strand; PAM type: YTN; PAM sequence: TTA
  source 1..20: mol_type = other DNA
tctcccttcagggctgccca

SEQ ID NO: 17605 - DNA, 20 bp, synthetic construct
  misc_feature 1..20: note = Description of Artificial Sequence: Synthetic oligonucleotide
  misc_feature 1..20: note = Target: ANGPTL4; (+) strand; PAM type: YTN; PAM sequence: CTC
  source 1..20: mol_type = other DNA
ccttcagggctgcccaggga

SEQ ID NO: 17606 - DNA, 20 bp, synthetic construct
  misc_feature 1..20: note = Description of Artificial Sequence: Synthetic oligonucleotide
  misc_feature 1..20: note = Target: ANGPTL4; (+) strand; PAM type: YTN; PAM sequence: CTT
  source 1..20: mol_type = other DNA
cagggctgcccagggattgc

SEQ ID NO: 17607 - DNA, 20 bp, synthetic construct
  misc_feature 1..20: note = Description of Artificial Sequence: Synthetic oligonucleotide
  misc_feature 1..20: note = Target: ANGPTL4; (+) strand; PAM type: YTN; PAM sequence: TTC
  source 1..20: mol_type = other DNA
agggctgcccagggattgcc

SEQ ID NO: 17608 - DNA, 20 bp, synthetic construct
  misc_feature 1..20: note = Description of Artificial Sequence: Synthetic oligonucleotide
  misc_feature 1..20: note = Target: ANGPTL4; (+) strand; PAM type: YTN; PAM sequence: CTG
  source 1..20: mol_type = other DNA
cccagggattgccaggagct

SEQ ID NO: 17609 - DNA, 20 bp, synthetic construct
  misc_feature 1..20: note = Description of Artificial Sequence: Synthetic oligonucleotide
  misc_feature 1..20: note = Target: ANGPTL4; (+) strand; PAM type: YTN; PAM sequence: TTG
  source 1..20: mol_type = other DNA
ccaggagctgttccaggttg

SEQ ID NO: 17610 - DNA, 20 bp, synthetic construct
  misc_feature 1..20: note = Description of Artificial Sequence: Synthetic oligonucleotide
  misc_feature 1..20: note = Target: ANGPTL4; (+) strand; PAM type: YTN; PAM sequence: CTG
  source 1..20: mol_type = other DNA
ttccaggttggggagaggca

SEQ ID NO: 17611 - DNA, 20 bp, synthetic construct
  misc_feature 1..20: note = Description of Artificial Sequence: Synthetic oligonucleotide
  misc_feature 1..20: note = Target: ANGPTL4; (+) strand; PAM type: YTN; PAM sequence: TTC
  source 1..20: mol_type = other DNA
caggttggggagaggcagag

SEQ ID NO: 17612 - DNA, 20 bp, synthetic construct
  misc_feature 1..20: note = Description of Artificial Sequence: Synthetic oligonucleotide
  misc_feature 1..20: note = Target: ANGPTL4; (+) strand; PAM type: YTN; PAM sequence: TTG
  source 1..20: mol_type = other DNA
gggagaggcagagtggacta

SEQ ID NO: 17613 - DNA, 20 bp, synthetic construct
  misc_feature 1..20: note = Description of Artificial Sequence: Synthetic oligonucleotide
  misc_feature 1..20: note = Target: ANGPTL4; (+) strand; PAM type: YTN; PAM sequence: CTA
  source 1..20: mol_type = other DNA
tttgaaatccagcctcaggg

SEQ ID NO: 17614 - DNA, 20 bp, synthetic construct
  misc_feature 1..20: note = Description of Artificial Sequence: Synthetic oligonucleotide
  misc_feature 1..20: note = Target: ANGPTL4; (+) strand; PAM type: YTN; PAM sequence: TTT
  source 1..20: mol_type = other DNA
gaaatccagcctcaggggtc

SEQ ID NO: 17615 - DNA, 20 bp, synthetic construct
  misc_feature 1..20: note = Description of Artificial Sequence: Synthetic oligonucleotide
  misc_feature 1..20: note = Target: ANGPTL4; (+) strand; PAM type: YTN; PAM sequence: TTG
  source 1..20: mol_type = other DNA
aaatccagcctcaggggtct

SEQ ID NO: 17616 - DNA, 20 bp, synthetic construct
  misc_feature 1..20: note = Description of Artificial Sequence: Synthetic oligonucleotide
  misc_feature 1..20: note = Target: ANGPTL4; (+) strand; PAM type: YTN; PAM sequence: CTC
  source 1..20: mol_type = other DNA
aggggtctccgccatttttg

SEQ ID NO: 17617 - DNA, 20 bp, synthetic construct
  misc_feature 1..20: note = Description of Artificial Sequence: Synthetic oligonucleotide
  misc_feature 1..20: note = Target: ANGPTL4; (+) strand; PAM type: YTN; PAM sequence: CTC
  source 1..20: mol_type = other DNA
cgccatttttggtgaactgc

SEQ ID NO: 17618 - DNA, 20 bp, synthetic construct
  misc_feature 1..20: note = Description of Artificial Sequence: Synthetic oligonucleotide
  misc_feature 1..20: note = Target: ANGPTL4; (+) strand; PAM type: YTN; PAM sequence: TTT
  source 1..20: mol_type = other DNA
ttggtgaactgcaagatgac

SEQ ID NO: 17619 - DNA, 20 bp, synthetic construct
  misc_feature 1..20: note = Description of Artificial Sequence: Synthetic oligonucleotide
  misc_feature 1..20: note = Target: ANGPTL4; (+) strand; PAM type: YTN; PAM sequence: TTT
  source 1..20: mol_type = other DNA
tggtgaactgcaagatgacc

SEQ ID NO: 17620 - DNA, 20 bp, synthetic construct
  misc_feature 1..20: note = Description of Artificial Sequence: Synthetic oligonucleotide
  misc_feature 1..20: note = Target: ANGPTL4; (+) strand; PAM type: YTN; PAM sequence: TTT
  source 1..20: mol_type = other DNA
ggtgaactgcaagatgacct

SEQ ID NO: 17621 - DNA, 20 bp, synthetic construct
  misc_feature 1..20: note = Description of Artificial Sequence: Synthetic oligonucleotide
  misc_feature 1..20: note = Target: ANGPTL4; (+) strand; PAM type: YTN; PAM sequence: TTG
  source 1..20: mol_type = other DNA
gtgaactgcaagatgacctc

SEQ ID NO: 17622 - DNA, 20 bp, synthetic construct
  misc_feature 1..20: note = Description of Artificial Sequence: Synthetic oligonucleotide
  misc_feature 1..20: note = Target: ANGPTL4; (+) strand; PAM type: YTN; PAM sequence: CTG
  source 1..20: mol_type = other DNA
caagatgacctcaggtaggg

SEQ ID NO: 17623 - DNA, 20 bp, synthetic construct
  misc_feature 1..20: note = Description of Artificial Sequence: Synthetic oligonucleotide
  misc_feature 1..20: note = Target: ANGPTL4; (+) strand; PAM type: YTN; PAM sequence: CTC
  source 1..20: mol_type = other DNA
aggtagggtgtgttagtcca

SEQ ID NO: 17624 - DNA, 20 bp, synthetic construct
  misc_feature 1..20: note = Description of Artificial Sequence: Synthetic oligonucleotide
  misc_feature 1..20: note = Target: ANGPTL4; (+) strand; PAM type: YTN; PAM sequence: TTA
  source 1..20: mol_type = other DNA
gtccaccaggggcccctctc

SEQ ID NO: 17625 - DNA, 20 bp, synthetic construct
  misc_feature 1..20: note = Description of Artificial Sequence: Synthetic oligonucleotide
  misc_feature 1..20: note = Target: ANGPTL4; (+) strand; PAM type: YTN; PAM sequence: CTC
  source 1..20: mol_type = other DNA
tccccataggccctgttgtc

SEQ ID NO: 17626 - DNA, 20 bp, synthetic construct
  misc_feature 1..20: note = Description of Artificial Sequence: Synthetic oligonucleotide
  misc_feature 1..20: note = Target: ANGPTL4; (+) strand; PAM type: YTN; PAM sequence: CTC
  source 1..20: mol_type = other DNA
cccataggccctgttgtctt

SEQ ID NO: 17627 - DNA, 20 bp, synthetic construct
  misc_feature 1..20: note = Description of Artificial Sequence: Synthetic oligonucleotide
  misc_feature 1..20: note = Target: ANGPTL4; (+) strand; PAM type: YTN; PAM sequence: CTG
  source 1..20: mol_type = other DNA
ttgtctttctttaaattgaa

SEQ ID NO: 17628 - DNA, 20 bp, synthetic construct
  misc_feature 1..20: note = Description of Artificial Sequence: Synthetic oligonucleotide
  misc_feature 1..20: note = Target: ANGPTL4; (+) strand; PAM type: YTN; PAM sequence: TTG
  source 1..20: mol_type = other DNA
tctttctttaaattgaaaac

SEQ ID NO: 17629 - DNA, 20 bp, synthetic construct
  misc_feature 1..20: note = Description of Artificial Sequence: Synthetic oligonucleotide
  misc_feature 1..20: note = Target: ANGPTL4; (+) strand; PAM type: YTN; PAM sequence: CTT
  source 1..20: mol_type = other DNA
tctttaaattgaaaacaaaa

SEQ ID NO: 17630 - DNA, 20 bp, synthetic construct
  misc_feature 1..20: note = Description of Artificial Sequence: Synthetic oligonucleotide
  misc_feature 1..20: note = Target: ANGPTL4; (+) strand; PAM type: YTN; PAM sequence: TTT
  source 1..20: mol_type = other DNA
ctttaaattgaaaacaaaac

SEQ ID NO: 17631 - DNA, 20 bp, synthetic construct
  misc_feature 1..20: note = Description of Artificial Sequence: Synthetic oligonucleotide
  misc_feature 1..20: note = Target: ANGPTL4; (+) strand; PAM type: YTN; PAM sequence: TTC
  source 1..20: mol_type = other DNA
tttaaattgaaaacaaaaca

SEQ ID NO: 17632 - DNA, 20 bp, synthetic construct
  misc_feature 1..20: note = Description of Artificial Sequence: Synthetic oligonucleotide
  misc_feature 1..20: note = Target: ANGPTL4; (+) strand; PAM type: YTN; PAM sequence: CTT
  source 1..20: mol_type = other DNA
taaattgaaaacaaaacaaa

SEQ ID NO: 17633 - DNA, 20 bp, synthetic construct
  misc_feature 1..20: note = Description of Artificial Sequence: Synthetic oligonucleotide
  misc_feature 1..20: note = Target: ANGPTL4; (+) strand; PAM type: YTN; PAM sequence: TTT
  source 1..20: mol_type = other DNA
aaattgaaaacaaaacaaaa

SEQ ID NO: 17634 - DNA, 20 bp, synthetic construct
  misc_feature 1..20: note = Description of Artificial Sequence: Synthetic oligonucleotide
  misc_feature 1..20: note = Target: ANGPTL4; (+) strand; PAM type: YTN; PAM sequence: TTA
  source 1..20: mol_type = other DNA
aattgaaaacaaaacaaaac

SEQ ID NO: 17635 - DNA, 20 bp, synthetic construct
  misc_feature 1..20: note = Description of Artificial Sequence: Synthetic oligonucleotide
  misc_feature 1..20: note = Target: ANGPTL4; (+) strand; PAM type: YTN; PAM sequence: TTG
  source 1..20: mol_type = other DNA
aaaacaaaacaaaacaaaaa

SEQ ID NO: 17636 - DNA, 20 bp, synthetic construct
  misc_feature 1..20: note = Description of Artificial Sequence: Synthetic oligonucleotide
  misc_feature 1..20: note = Target: ANGPTL4; (+) strand; PAM type: YTN; PAM sequence: TTA
  source 1..20: mol_type = other DNA
aaggcagggtcttgctatgt

SEQ ID NO: 17637 - DNA, 20 bp, synthetic construct
  misc_feature 1..20: note = Description of Artificial Sequence: Synthetic oligonucleotide
  misc_feature 1..20: note = Target: ANGPTL4; (+) strand; PAM type: YTN; PAM sequence: CTT
  source 1..20: mol_type = other DNA
gctatgttgcccaagctggt

SEQ ID NO: 17638 - DNA, 20 bp, synthetic construct
  misc_feature 1..20: note = Description of Artificial Sequence: Synthetic oligonucleotide
  misc_feature 1..20: note = Target: ANGPTL4; (+) strand; PAM type: YTN; PAM sequence: TTG
  source 1..20: mol_type = other DNA
ctatgttgcccaagctggtc

SEQ ID NO: 17639 - DNA, 20 bp, synthetic construct
  misc_feature 1..20: note = Description of Artificial Sequence: Synthetic oligonucleotide
  misc_feature 1..20: note = Target: ANGPTL4; (+) strand; PAM type: YTN; PAM sequence: CTA
  source 1..20: mol_type = other DNA
tgttgcccaagctggtcttt

SEQ ID NO: 17640 - DNA, 20 bp, synthetic construct
  misc_feature 1..20: note = Description of Artificial Sequence: Synthetic oligonucleotide
  misc_feature 1..20: note = Target: ANGPTL4; (+) strand; PAM type: YTN; PAM sequence: TTG
  source 1..20: mol_type = other DNA
cccaagctggtctttttttt

SEQ ID NO: 17641 - DNA, 20 bp, synthetic construct
  misc_feature 1..20: note = Description of Artificial Sequence: Synthetic oligonucleotide
  misc_feature 1..20: note = Target: ANGPTL4; (+) strand; PAM type: YTN; PAM sequence: CTG
  source 1..20: mol_type = other DNA
gtcttttttttttttttttt

SEQ ID NO: 17642 - DNA, 20 bp, synthetic construct
  misc_feature 1..20: note = Description of Artificial Sequence: Synthetic oligonucleotide
  misc_feature 1..20: note = Target: ANGPTL4; (+) strand; PAM type: YTN; PAM sequence: CTT
  source 1..20: mol_type = other DNA
tttttttttttttttttttg

SEQ ID NO: 17643 - DNA, 20 bp, synthetic construct
  misc_feature 1..20: note = Description of Artificial Sequence: Synthetic oligonucleotide
  misc_feature 1..20: note = Target: ANGPTL4; (+) strand; PAM type: YTN; PAM sequence: TTT
  source 1..20: mol_type = other DNA
ttttttttttttttttttga

SEQ ID NO: 17644 - DNA, 20 bp, synthetic construct
  misc_feature 1..20: note = Description of Artificial Sequence: Synthetic oligonucleotide
  misc_feature 1..20: note = Target: ANGPTL4; (+) strand; PAM type: YTN; PAM sequence: TTT
  source 1..20: mol_type = other DNA
tttttttttttttttttgag

SEQ ID NO: 17645 - DNA, 20 bp, synthetic construct
  misc_feature 1..20: note = Description of Artificial Sequence: Synthetic oligonucleotide
  misc_feature 1..20: note = Target: ANGPTL4; (+) strand; PAM type: YTN; PAM sequence: TTT
  source 1..20: mol_type = other DNA
ttttttttttttttttgaga

SEQ ID NO: 17646 - DNA, 20 bp, synthetic construct
  misc_feature 1..20: note = Description of Artificial Sequence: Synthetic oligonucleotide
  misc_feature 1..20: note = Target: ANGPTL4; (+) strand; PAM type: YTN; PAM sequence: TTT
  source 1..20: mol_type = other DNA
tttttttttttttttgagat

SEQ ID NO: 17647 - DNA, 20 bp, synthetic construct
  misc_feature 1..20: note = Description of Artificial Sequence: Synthetic oligonucleotide
  misc_feature 1..20: note = Target: ANGPTL4; (+) strand; PAM type: YTN; PAM sequence: TTT
  source 1..20: mol_type = other DNA
ttttttttttttttgagatg

SEQ ID NO: 17648 - DNA, 20 bp, synthetic construct
  misc_feature 1..20: note = Description of Artificial Sequence: Synthetic oligonucleotide
  misc_feature 1..20: note = Target: ANGPTL4; (+) strand; PAM type: YTN; PAM sequence: TTT
  source 1..20: mol_type = other DNA
tttttttttttttgagatgg

SEQ ID NO: 17649 - DNA, 20 bp, synthetic construct
  misc_feature 1..20: note = Description of Artificial Sequence: Synthetic oligonucleotide
  misc_feature 1..20: note = Target: ANGPTL4; (+) strand; PAM type: YTN; PAM sequence: TTT
  source 1..20: mol_type = other DNA
ttttttttttttgagatgga

SEQ ID NO: 17650 - DNA, 20 bp, synthetic construct
  misc_feature 1..20: note = Description of Artificial Sequence: Synthetic oligonucleotide
  misc_feature 1..20: note = Target: ANGPTL4; (+) strand; PAM type: YTN; PAM sequence: TTT
  source 1..20: mol_type = other DNA
tttttttttttgagatggag

SEQ ID NO: 17651 - DNA, 20 bp, synthetic construct
  misc_feature 1..20: note = Description of Artificial Sequence: Synthetic oligonucleotide
  misc_feature 1..20: note = Target: ANGPTL4; (+) strand; PAM type: YTN; PAM sequence: TTT
  source 1..20: mol_type = other DNA
ttttttttttgagatggagt

SEQ ID NO: 17652 - DNA, 20 bp, synthetic construct
  misc_feature 1..20: note = Description of Artificial Sequence: Synthetic oligonucleotide
  misc_feature 1..20: note = Target: ANGPTL4; (+) strand; PAM type: YTN; PAM sequence: TTT
  source 1..20: mol_type = other DNA
tttttttttgagatggagtt

SEQ ID NO: 17653 - DNA, 20 bp, synthetic construct
  misc_feature 1..20: note = Description of Artificial Sequence: Synthetic oligonucleotide
  misc_feature 1..20: note = Target: ANGPTL4; (+) strand; PAM type: YTN; PAM sequence: TTT
  source 1..20: mol_type = other DNA
ttttttttgagatggagttt

SEQ ID NO: 17654 - DNA, 20 bp, synthetic construct
  misc_feature 1..20: note = Description of Artificial Sequence: Synthetic oligonucleotide
  misc_feature 1..20: note = Target: ANGPTL4; (+) strand; PAM type: YTN; PAM sequence: TTT
  source 1..20: mol_type = other DNA
tttttttgagatggagtttt

SEQ ID NO: 17655 - DNA, 20 bp, synthetic construct
  misc_feature 1..20: note = Description of Artificial Sequence: Synthetic oligonucleotide
  misc_feature 1..20: note = Target: ANGPTL4; (+) strand; PAM type: YTN; PAM sequence: TTT
  source 1..20: mol_type = other DNA
ttttttgagatggagttttg

SEQ ID NO: 17656 - DNA, 20 bp, synthetic construct
  misc_feature 1..20: note = Description of Artificial Sequence: Synthetic oligonucleotide
  misc_feature 1..20: note = Target: ANGPTL4; (+) strand; PAM type: YTN; PAM sequence: TTT
  source 1..20: mol_type = other DNA
tttttgagatggagttttgc

SEQ ID NO: 17657 - DNA, 20 bp, synthetic construct
  misc_feature 1..20: note = Description of Artificial Sequence: Synthetic oligonucleotide
  misc_feature 1..20: note = Target: ANGPTL4; (+) strand; PAM type: YTN; PAM sequence: TTT
  source 1..20: mol_type = other DNA
ttttgagatggagttttgct

SEQ ID NO: 17658 - DNA, 20 bp, synthetic construct
  misc_feature 1..20: note = Description of Artificial Sequence: Synthetic oligonucleotide
  misc_feature 1..20: note = Target: ANGPTL4; (+) strand; PAM type: YTN; PAM sequence: TTT
  source 1..20: mol_type = other DNA
tttgagatggagttttgctc

SEQ ID NO: 17659 - DNA, 20 bp, synthetic construct
  misc_feature 1..20: note = Description of Artificial Sequence: Synthetic oligonucleotide
  misc_feature 1..20: note = Target: ANGPTL4; (+) strand; PAM type: YTN; PAM sequence: TTT
  source 1..20: mol_type = other DNA
ttgagatggagttttgctct

SEQ ID NO: 17660 - DNA, 20 bp, synthetic construct
  misc_feature 1..20: note = Description of Artificial Sequence: Synthetic oligonucleotide
  misc_feature 1..20: note = Target: ANGPTL4; (+) strand; PAM type: YTN; PAM sequence: TTT
  source 1..20: mol_type = other DNA
tgagatggagttttgctctt

SEQ ID NO: 17661 - DNA, 20 bp, synthetic construct
  misc_feature 1..20: note = Description of Artificial Sequence: Synthetic oligonucleotide
  misc_feature 1..20: note = Target: ANGPTL4; (+) strand; PAM type: YTN; PAM sequence: TTT
  source 1..20: mol_type = other DNA
gagatggagttttgctcttg

SEQ ID NO: 17662 - DNA, 20 bp, synthetic construct
  misc_feature 1..20: note = Description of Artificial Sequence: Synthetic oligonucleotide
  misc_feature 1..20: note = Target: ANGPTL4; (+) strand; PAM type: YTN; PAM sequence: TTG
  source 1..20: mol_type = other DNA
agatggagttttgctcttgg

SEQ ID NO: 17663 - DNA, 20 bp, synthetic construct
  misc_feature 1..20: note = Description of Artificial Sequence: Synthetic oligonucleotide
  misc_feature 1..20: note = Target: ANGPTL4; (+) strand; PAM type: YTN; PAM sequence: TTT
  source 1..20: mol_type = other DNA
tgctcttggagctggagtgc

SEQ ID NO: 17664 - DNA, 20 bp, synthetic construct
  misc_feature 1..20: note = Description of Artificial Sequence: Synthetic oligonucleotide
  misc_feature 1..20: note = Target: ANGPTL4; (+) strand; PAM type: YTN; PAM sequence: TTT
  source 1..20: mol_type = other DNA
gctcttggagctggagtgca

SEQ ID NO: 17665 - DNA, 20 bp, synthetic construct
  misc_feature 1..20: note = Description of Artificial Sequence: Synthetic oligonucleotide
  misc_feature 1..20: note = Target: ANGPTL4; (+) strand; PAM type: YTN; PAM sequence: TTG
  source 1..20: mol_type = other DNA
ctcttggagctggagtgcaa

SEQ ID NO: 17666 - DNA, 20 bp, synthetic construct
  misc_feature 1..20: note = Description of Artificial Sequence: Synthetic oligonucleotide
  misc_feature 1..20: note = Target: ANGPTL4; (+) strand; PAM type: YTN; PAM sequence: CTC
  source 1..20: mol_type = other DNA
ttggagctggagtgcaatgc

SEQ ID NO: 17667 - DNA, 20 bp, synthetic construct
  misc_feature 1..20: note = Description of Artificial Sequence: Synthetic oligonucleotide
  misc_feature 1..20: note = Target: ANGPTL4; (+) strand; PAM type: YTN; PAM sequence: CTT
  source 1..20: mol_type = other DNA
ggagctggagtgcaatgcca

SEQ ID NO: 17668 - DNA, 20 bp, synthetic construct
  misc_feature 1..20: note = Description of Artificial Sequence: Synthetic oligonucleotide
  misc_feature 1..20: note = Target: ANGPTL4; (+) strand; PAM type: YTN; PAM sequence: TTG
  source 1..20: mol_type = other DNA
gagctggagtgcaatgccac

SEQ ID NO: 17669 - DNA, 20 bp, synthetic construct
  misc_feature 1..20: note = Description of Artificial Sequence: Synthetic oligonucleotide
  misc_feature 1..20: note = Target: ANGPTL4; (+) strand; PAM type: YTN; PAM sequence: CTG
  source 1..20: mol_type = other DNA
gagtgcaatgccacgatctc

SEQ ID NO: 17670 - DNA, 20 bp, synthetic construct
  misc_feature 1..20: note = Description of Artificial Sequence: Synthetic oligonucleotide
  misc_feature 1..20: note = Target: ANGPTL4; (+) strand; PAM type: YTN; PAM sequence: CTC
  source 1..20: mol_type = other DNA
agctcactgaaacctccgcc

SEQ ID NO: 17671 - DNA, 20 bp, synthetic construct
  misc_feature 1..20: note = Description of Artificial Sequence: Synthetic oligonucleotide
  misc_feature 1..20: note = Target: ANGPTL4; (+) strand; PAM type: YTN; PAM sequence: CTC
  source 1..20: mol_type = other DNA
actgaaacctccgcctcccg

SEQ ID NO: 17672 - DNA, 20 bp, synthetic construct
  misc_feature 1..20: note = Description of Artificial Sequence: Synthetic oligonucleotide
  misc_feature 1..20: note = Target: ANGPTL4; (+) strand; PAM type: YTN; PAM sequence: CTG
  source 1..20: mol_type = other DNA
aaacctccgcctcccgggtt

SEQ ID NO: 17673 - DNA, 20 bp, synthetic construct
  misc_feature 1..20: note = Description of Artificial Sequence: Synthetic oligonucleotide
  misc_feature 1..20: note = Target: ANGPTL4; (+) strand; PAM type: YTN; PAM sequence: CTC
  source 1..20: mol_type = other DNA
cgcctcccgggttcaagcaa

SEQ ID NO: 17674 - DNA, 20 bp, synthetic construct
  misc_feature 1..20: note = Description of Artificial Sequence: Synthetic oligonucleotide
  misc_feature 1..20: note = Target: ANGPTL4; (+) strand; PAM type: YTN; PAM sequence: CTC
  source 1..20: mol_type = other DNA
ccgggttcaagcaattctcc

SEQ ID NO: 17675 - DNA, 20 bp, synthetic construct
  misc_feature 1..20: note = Description of Artificial Sequence: Synthetic oligonucleotide
  misc_feature 1..20: note = Target: ANGPTL4; (+) strand; PAM type: YTN; PAM sequence: TTC
  source 1..20: mol_type = other DNA
aagcaattctccagcgtcag

SEQ ID NO: 17676 - DNA, 20 bp, synthetic construct
  misc_feature 1..20: note = Description of Artificial Sequence: Synthetic oligonucleotide
  misc_feature 1..20: note = Target: ANGPTL4; (+) strand; PAM type: YTN; PAM sequence: TTC
  source 1..20: mol_type = other DNA
tccagcgtcagcctccccag

SEQ ID NO: 17677 - DNA, 20 bp, synthetic construct
  misc_feature 1..20: note = Description of Artificial Sequence: Synthetic oligonucleotide
  misc_feature 1..20: note = Target: ANGPTL4; (+) strand; PAM type: YTN; PAM sequence: CTC
  source 1..20: mol_type = other DNA
cagcgtcagcctccccagta

SEQ ID NO: 17678 - DNA, 20 bp, synthetic construct
  misc_feature 1..20: note = Description of Artificial Sequence: Synthetic oligonucleotide
  misc_feature 1..20: note = Target: ANGPTL4; (+) strand; PAM type: YTN; PAM sequence: CTC
  source 1..20: mol_type = other DNA
cccagtagctgagactacag

SEQ ID NO: 17679 - DNA, 20 bp, synthetic construct
  misc_feature 1..20: note = Description of Artificial Sequence: Synthetic oligonucleotide
  misc_feature 1..20: note = Target: ANGPTL4; (+) strand; PAM type: YTN; PAM sequence: CTG
  source 1..20: mol_type = other DNA
agactacaggtgcgagcaac

SEQ ID NO: 17680 - DNA, 20 bp, synthetic construct
  misc_feature 1..20: note = Description of Artificial Sequence: Synthetic oligonucleotide
  misc_feature 1..20: note = Target: ANGPTL4; (+) strand; PAM type: YTN; PAM sequence: CTA
  source 1..20: mol_type = other DNA
caggtgcgagcaaccacacc

SEQ ID NO: 17681 - DNA, 20 bp, synthetic construct
  misc_feature 1..20: note = Description of Artificial Sequence: Synthetic oligonucleotide
  misc_feature 1..20: note = Target: ANGPTL4; (+) strand; PAM type: YTN; PAM sequence: CTA
  source 1..20: mol_type = other DNA
atttttgtatttttagtaga

SEQ ID NO: 17682 - DNA, 20 bp, synthetic construct
  misc_feature 1..20: note = Description of Artificial Sequence: Synthetic oligonucleotide
  misc_feature 1..20: note = Target: ANGPTL4; (+) strand; PAM type: YTN; PAM sequence: TTT
  source 1..20: mol_type = other DNA
ttgtatttttagtagagact

SEQ ID NO: 17683 - DNA, 20 bp, synthetic construct
  misc_feature 1..20: note = Description of Artificial Sequence: Synthetic oligonucleotide
  misc_feature 1..20: note = Target: ANGPTL4; (+) strand; PAM type: YTN; PAM sequence: TTT
  source 1..20: mol_type = other DNA
tgtatttttagtagagactg

SEQ ID NO: 17684 - DNA, 20 bp, synthetic construct
  misc_feature 1..20: note = Description of Artificial Sequence: Synthetic oligonucleotide
  misc_feature 1..20: note = Target: ANGPTL4; (+) strand; PAM type: YTN; PAM sequence: TTT
  source 1..20: mol_type = other DNA
gtatttttagtagagactgg

SEQ ID NO: 17685 - DNA, 20 bp, synthetic construct
  misc_feature 1..20: note = Description of Artificial Sequence: Synthetic oligonucleotide
  misc_feature 1..20: note = Target: ANGPTL4; (+) strand; PAM type: YTN; PAM sequence: TTG
  source 1..20: mol_type = other DNA
tatttttagtagagactggg

SEQ ID NO: 17686 - DNA, 20 bp, synthetic construct
  misc_feature 1..20: note = Description of Artificial Sequence: Synthetic oligonucleotide
  misc_feature 1..20: note = Target: ANGPTL4; (+) strand; PAM type: YTN; PAM sequence: TTT
  source 1..20: mol_type = other DNA
ttagtagagactgggtttca

SEQ ID NO: 17687 - DNA, 20 bp, synthetic construct
  misc_feature 1..20: note = Description of Artificial Sequence: Synthetic oligonucleotide
  misc_feature 1..20: note = Target: ANGPTL4; (+) strand; PAM type: YTN; PAM sequence: TTT
  source 1..20: mol_type = other DNA
tagtagagactgggtttcac

SEQ ID NO: 17688 - DNA, 20 bp, synthetic construct
  misc_feature 1..20: note = Description of Artificial Sequence: Synthetic oligonucleotide
  misc_feature 1..20: note = Target: ANGPTL4; (+) strand; PAM type: YTN; PAM sequence: TTT
  source 1..20: mol_type = other DNA
agtagagactgggtttcacc

SEQ ID NO: 17689 - DNA, 20 bp, synthetic construct
  misc_feature 1..20: note = Description of Artificial Sequence: Synthetic oligonucleotide
  misc_feature 1..20: note = Target: ANGPTL4; (+) strand; PAM type: YTN; PAM sequence: TTA
  source 1..20: mol_type = other DNA
gtagagactgggtttcacca

SEQ ID NO: 17690 - DNA, 20 bp, synthetic construct
  misc_feature 1..20: note = Description of Artificial Sequence: Synthetic oligonucleotide
  misc_feature 1..20: note = Target: ANGPTL4; (+) strand; PAM type: YTN; PAM sequence: CTG
  source 1..20: mol_type = other DNA
ggtttcaccatgttggtctg

SEQ ID NO: 17691 - DNA, 20 bp, synthetic construct
  misc_feature 1..20: note = Description of Artificial Sequence: Synthetic oligonucleotide
  misc_feature 1..20: note = Target: ANGPTL4; (+) strand; PAM type: YTN; PAM sequence: TTT
  source 1..20: mol_type = other DNA
caccatgttggtctggctgg

SEQ ID NO: 17692 - DNA, 20 bp, synthetic construct
  misc_feature 1..20: note = Description of Artificial Sequence: Synthetic oligonucleotide
  misc_feature 1..20: note = Target: ANGPTL4; (+) strand; PAM type: YTN; PAM sequence: TTC
  source 1..20: mol_type = other DNA
accatgttggtctggctggt

SEQ ID NO: 17693 - DNA, 20 bp, synthetic construct
  misc_feature 1..20: note = Description of Artificial Sequence: Synthetic oligonucleotide
  misc_feature 1..20: note = Target: ANGPTL4; (+) strand; PAM type: YTN; PAM sequence: TTG
  source 1..20: mol_type = other DNA
gtctggctggtctcaaactc

SEQ ID NO: 17694 - DNA, 20 bp, synthetic construct
  misc_feature 1..20: note = Description of Artificial Sequence: Synthetic oligonucleotide
  misc_feature 1..20: note = Target: ANGPTL4; (+) strand; PAM type: YTN; PAM sequence: CTG
  source 1..20: mol_type = other DNA
gctggtctcaaactcctgac

SEQ ID NO: 17695 - DNA, 20 bp, synthetic construct
  misc_feature 1..20: note = Description of Artificial Sequence: Synthetic oligonucleotide
  misc_feature 1..20: note = Target: ANGPTL4; (+) strand; PAM type: YTN; PAM sequence: CTG
  source 1..20: mol_type = other DNA
gtctcaaactcctgacctca

SEQ ID NO: 17696 - DNA, 20 bp, synthetic construct
  misc_feature 1..20: note = Description of Artificial Sequence: Synthetic oligonucleotide
  misc_feature 1..20: note = Target: ANGPTL4; (+) strand; PAM type: YTN; PAM sequence: CTC
  source 1..20: mol_type = other DNA
aaactcctgacctcaaatga

SEQ ID NO: 17697 - DNA, 20 bp, synthetic construct
  misc_feature 1..20: note = Description of Artificial Sequence: Synthetic oligonucleotide
  misc_feature 1..20: note = Target: ANGPTL4; (+) strand; PAM type: YTN; PAM sequence: CTC
  source 1..20: mol_type = other DNA
ctgacctcaaatgatttgcc

SEQ ID NO: 17698 - DNA, 20 bp, synthetic construct
  misc_feature 1..20: note = Description of Artificial Sequence: Synthetic oligonucleotide
  misc_feature 1..20: note = Target: ANGPTL4; (+) strand; PAM type: YTN; PAM sequence: CTG
  source 1..20: mol_type = other DNA
acctcaaatgatttgccgac

SEQ ID NO: 17699 - DNA, 20 bp, synthetic construct
  misc_feature 1..20: note = Description of Artificial Sequence: Synthetic oligonucleotide
  misc_feature 1..20: note = Target: ANGPTL4; (+) strand; PAM type: YTN; PAM sequence: CTC
  source 1..20: mol_type = other DNA
aaatgatttgccgactttgg

SEQ ID NO: 17700 - DNA, 20 bp, synthetic construct
  misc_feature 1..20: note = Description of Artificial Sequence: Synthetic oligonucleotide
  misc_feature 1..20: note = Target: ANGPTL4; (+) strand; PAM type: YTN; PAM sequence: TTT
  source 1..20: mol_type = other DNA
gccgactttggcctcccaaa

SEQ ID NO: 17701 - DNA, 20 bp, synthetic construct
  misc_feature 1..20: note = Description of Artificial Sequence: Synthetic oligonucleotide
  misc_feature 1..20: note = Target: ANGPTL4; (+) strand; PAM type: YTN; PAM sequence: TTG
  source 1..20: mol_type = other DNA
ccgactttggcctcccaaaa

SEQ ID NO: 17702 - DNA, 20 bp, synthetic construct
  misc_feature 1..20: note = Description of Artificial Sequence: Synthetic oligonucleotide
  misc_feature 1..20: note = Target: ANGPTL4; (+) strand; PAM type: YTN; PAM sequence: CTT
  source 1..20: mol_type = other DNA
tggcctcccaaaatgctggg

SEQ ID NO: 17703 - DNA, 20 bp, synthetic construct
  misc_feature 1..20: note = Description of Artificial Sequence: Synthetic oligonucleotide
  misc_feature 1..20: note = Target: ANGPTL4; (+) strand; PAM type: YTN; PAM sequence: TTT
  source 1..20: mol_type = other DNA
ggcctcccaaaatgctggga

SEQ ID NO: 17704 - DNA, 20 bp, synthetic construct
  misc_feature 1..20: note = Description of Artificial Sequence: Synthetic oligonucleotide
  misc_feature 1..20: note = Target: ANGPTL4; (+) strand; PAM type: YTN; PAM sequence: TTG
  source 1..20: mol_type = other DNA
gcctcccaaaatgctgggat

SEQ ID NO: 17705 - DNA, 20 bp, synthetic construct
  misc_feature 1..20: note = Description of Artificial Sequence: Synthetic oligonucleotide
  misc_feature 1..20: note = Target: ANGPTL4; (+) strand; PAM type: YTN; PAM sequence: CTC
  source 1..20: mol_type = other DNA
ccaaaatgctgggattatag

SEQ ID NO: 17706 - DNA, 20 bp, synthetic construct
  misc_feature 1..20: note = Description of Artificial Sequence: Synthetic oligonucleotide
  misc_feature 1..20: note = Target: ANGPTL4; (+) strand; PAM type: YTN; PAM sequence: CTG
  source 1..20: mol_type = other DNA
ggattataggcattagccac

SEQ ID NO: 17707 - DNA, 20 bp, synthetic construct
  misc_feature 1..20: note = Description of Artificial Sequence: Synthetic oligonucleotide
  misc_feature 1..20: note = Target: ANGPTL4; (+) strand; PAM type: YTN; PAM sequence: TTA
  source 1..20: mol_type = other DNA
taggcattagccactgctcc

SEQ ID NO: 17708 - DNA, 20 bp, synthetic construct
  misc_feature 1..20: note = Description of Artificial Sequence: Synthetic oligonucleotide
  misc_feature 1..20: note = Target: ANGPTL4; (+) strand; PAM type: YTN; PAM sequence: TTA
  source 1..20: mol_type = other DNA
gccactgctcctggcctctt

SEQ ID NO: 17709 - DNA, 20 bp, synthetic construct
  misc_feature 1..20: note = Description of Artificial Sequence: Synthetic oligonucleotide
  misc_feature 1..20: note = Target: ANGPTL4; (+) strand; PAM type: YTN; PAM sequence: CTG
  source 1..20: mol_type = other DNA
ctcctggcctcttttcttta

SEQ ID NO: 17710 - DNA, 20 bp, synthetic construct
  misc_feature 1..20: note = Description of Artificial Sequence: Synthetic oligonucleotide
  misc_feature 1..20: note = Target: ANGPTL4; (+) strand; PAM type: YTN; PAM sequence: CTC
  source 1..20: mol_type = other DNA
ctggcctcttttctttaaaa

SEQ ID NO: 17711 - DNA, 20 bp, synthetic construct
  misc_feature 1..20: note = Description of Artificial Sequence: Synthetic oligonucleotide
  misc_feature 1..20: note = Target: ANGPTL4; (+) strand; PAM type: YTN; PAM sequence: CTG
  source 1..20: mol_type = other DNA
gcctcttttctttaaaatgc

SEQ ID NO: 17712 - DNA, 20 bp, synthetic construct
  misc_feature 1..20: note = Description of Artificial Sequence: Synthetic oligonucleotide
  misc_feature 1..20: note = Target: ANGPTL4; (+) strand; PAM type: YTN; PAM sequence: CTC
  source 1..20: mol_type = other DNA
ttttctttaaaatgcagccc

SEQ ID NO: 17713 - DNA, 20 bp, synthetic construct
  misc_feature 1..20: note = Description of Artificial Sequence: Synthetic oligonucleotide
  misc_feature 1..20: note = Target: ANGPTL4; (+) strand; PAM type: YTN; PAM sequence: CTT
  source 1..20: mol_type = other DNA
ttctttaaaatgcagccctt

SEQ ID NO: 17714 - DNA, 20 bp, synthetic construct
  misc_feature 1..20: note = Description of Artificial Sequence: Synthetic oligonucleotide
  misc_feature 1..20: note = Target: ANGPTL4; (+) strand; PAM type: YTN; PAM sequence: TTT
  source 1..20: mol_type = other DNA
tctttaaaatgcagcccttg

SEQ ID NO: 17715 - DNA, 20 bp, synthetic construct
  misc_feature 1..20: note = Description of Artificial Sequence: Synthetic oligonucleotide
  misc_feature 1..20: note = Target: ANGPTL4; (+) strand; PAM type: YTN; PAM sequence: TTT
  source 1..20: mol_type = other DNA
ctttaaaatgcagcccttgt

SEQ ID NO: 17716 - DNA, 20 bp, synthetic construct
  misc_feature 1..20: note = Description of Artificial Sequence: Synthetic oligonucleotide
  misc_feature 1..20: note = Target: ANGPTL4; (+) strand; PAM type: YTN; PAM sequence: TTC
  source 1..20: mol_type = other DNA
tttaaaatgcagcccttgtc

SEQ ID NO: 17717 - DNA, 20 bp, synthetic construct
  misc_feature 1..20: note = Description of Artificial Sequence: Synthetic oligonucleotide
  misc_feature 1..20: note = Target: ANGPTL4; (+) strand; PAM type: YTN; PAM sequence: CTT
  source 1..20: mol_type = other DNA
taaaatgcagcccttgtctg

SEQ ID NO: 17718 - DNA, 20 bp, synthetic construct
  misc_feature 1..20: note = Description of Artificial Sequence: Synthetic oligonucleotide
  misc_feature 1..20: note = Target: ANGPTL4; (+) strand; PAM type: YTN; PAM sequence: TTT
  source 1..20: mol_type = other DNA
aaaatgcagcccttgtctgg

SEQ ID NO: 17719 - DNA, 20 bp, synthetic construct
  misc_feature 1..20: note = Description of Artificial Sequence: Synthetic oligonucleotide
  misc_feature 1..20: note = Target: ANGPTL4; (+) strand; PAM type: YTN; PAM sequence: TTA
  source 1..20: mol_type = other DNA
aaatgcagcccttgtctggg

SEQ ID NO: 17720 - DNA, 20 bp, synthetic construct
  misc_feature 1..20: note = Description of Artificial Sequence: Synthetic oligonucleotide
  misc_feature 1..20: note = Target: ANGPTL4; (+) strand; PAM type: YTN; PAM sequence: CTT
  source 1..20: mol_type = other DNA
gtctgggtgtagtggctcat

SEQ ID NO: 17721 - DNA, 20 bp, synthetic construct
  misc_feature 1..20: note = Description of Artificial Sequence: Synthetic oligonucleotide
  misc_feature 1..20: note = Target: ANGPTL4; (+) strand; PAM type: YTN; PAM sequence: TTG
  source 1..20: mol_type = other DNA
tctgggtgtagtggctcata

SEQ ID NO: 17722 - DNA, 20 bp, synthetic construct
  misc_feature 1..20: note = Description of Artificial Sequence: Synthetic oligonucleotide
  misc_feature 1..20: note = Target: ANGPTL4; (+) strand; PAM type: YTN; PAM sequence: CTG
  source 1..20: mol_type = other DNA
ggtgtagtggctcatatctg

SEQ ID NO: 17723 - DNA, 20 bp, synthetic construct
  misc_feature 1..20: note = Description of Artificial Sequence: Synthetic oligonucleotide
  misc_feature 1..20: note = Target: ANGPTL4; (+) strand; PAM type: YTN; PAM sequence: CTC
  source 1..20: mol_type = other DNA
atatctgtaatcccgacact

SEQ ID NO: 17724 - DNA, 20 bp, synthetic construct
  misc_feature 1..20: note = Description of Artificial Sequence: Synthetic oligonucleotide
  misc_feature 1..20: note = Target: ANGPTL4; (+) strand; PAM type: YTN; PAM sequence: CTG
  source 1..20: mol_type = other DNA
taatcccgacactttgggag

SEQ ID NO: 17725 - DNA, 20 bp, synthetic construct
  misc_feature 1..20: note = Description of Artificial Sequence: Synthetic oligonucleotide
  misc_feature 1..20: note = Target: ANGPTL4; (+) strand; PAM type: YTN; PAM sequence: CTT
  source 1..20: mol_type = other DNA
tgggaggcctatcatgagga

SEQ ID NO: 17726 - DNA, 20 bp, synthetic construct
  misc_feature 1..20: note = Description of Artificial Sequence: Synthetic oligonucleotide
  misc_feature 1..20: note = Target: ANGPTL4; (+) strand; PAM type: YTN; PAM sequence: TTT
  source 1..20: mol_type = other DNA
gggaggcctatcatgaggat

SEQ ID NO: 17727 - DNA, 20 bp, synthetic construct
  misc_feature 1..20: note = Description of Artificial Sequence: Synthetic oligonucleotide
  misc_feature 1..20: note = Target: ANGPTL4; (+) strand; PAM type: YTN; PAM sequence: TTG
  source 1..20: mol_type = other DNA
ggaggcctatcatgaggatc

SEQ ID NO: 17728 - DNA, 20 bp, synthetic construct
  misc_feature 1..20: note = Description of Artificial Sequence: Synthetic oligonucleotide
  misc_feature 1..20: note = Target: ANGPTL4; (+) strand; PAM type: YTN; PAM sequence: CTA
  source 1..20: mol_type = other DNA
tcatgaggatcacttgagcc

SEQ ID NO: 17729 - DNA, 20 bp, synthetic construct
  misc_feature 1..20: note = Description of Artificial Sequence: Synthetic oligonucleotide
  misc_feature 1..20: note = Target: ANGPTL4; (+) strand; PAM type: YTN; PAM sequence: CTT
  source 1..20: mol_type = other DNA
gagcccagaagttcgagacc

SEQ ID NO: 17730 - DNA, 20 bp, synthetic construct
  misc_feature 1..20: note = Description of Artificial Sequence: Synthetic oligonucleotide
  misc_feature 1..20: note = Target: ANGPTL4; (+) strand; PAM type: YTN; PAM sequence: TTG
  source 1..20: mol_type = other DNA
agcccagaagttcgagacca

SEQ ID NO: 17731 - DNA, 20 bp, synthetic construct
  misc_feature 1..20: note = Description of Artificial Sequence: Synthetic oligonucleotide
  misc_feature 1..20: note = Target: ANGPTL4; (+) strand; PAM type: YTN; PAM sequence: TTC
  source 1..20: mol_type = other DNA
gagaccagcctggacaacat

SEQ ID NO: 17732 - DNA, 20 bp, synthetic construct
  misc_feature 1..20: note = Description of Artificial Sequence: Synthetic oligonucleotide
  misc_feature 1..20: note = Target: ANGPTL4; (+) strand; PAM type: YTN; PAM sequence: CTG
  source 1..20: mol_type = other DNA
gacaacatagtgagagctca

SEQ ID NO: 17733 - DNA, 20 bp, synthetic construct
  misc_feature 1..20: note = Description of Artificial Sequence: Synthetic oligonucleotide
  misc_feature 1..20: note = Target: ANGPTL4; (+) strand; PAM type: YTN; PAM sequence: CTC
  source 1..20: mol_type = other DNA
atctttacaaaaaattttgt

SEQ ID NO: 17734 - DNA, 20 bp, synthetic construct
  misc_feature 1..20: note = Description of Artificial Sequence: Synthetic oligonucleotide
  misc_feature 1..20: note = Target: ANGPTL4; (+) strand; PAM type: YTN; PAM sequence: CTT
  source 1..20: mol_type = other DNA
tacaaaaaattttgtaaaag

SEQ ID NO: 17735 - DNA, 20 bp, synthetic construct
  misc_feature 1..20: note = Description of Artificial Sequence: Synthetic oligonucleotide
  misc_feature 1..20: note = Target: ANGPTL4; (+) strand; PAM type: YTN; PAM sequence: TTT
  source 1..20: mol_type = other DNA
acaaaaaattttgtaaaagt

SEQ ID NO: 17736 - DNA, 20 bp, synthetic construct
  misc_feature 1..20: note = Description of Artificial Sequence: Synthetic oligonucleotide
  misc_feature 1..20: note = Target: ANGPTL4; (+) strand; PAM type: YTN; PAM sequence: TTA
  source 1..20: mol_type = other DNA
caaaaaattttgtaaaagta

SEQ ID NO: 17737 - DNA, 20 bp, synthetic construct
  misc_feature 1..20: note = Description of Artificial Sequence: Synthetic oligonucleotide
  misc_feature 1..20: note = Target: ANGPTL4; (+) strand; PAM type: YTN; PAM sequence: TTT
  source 1..20: mol_type = other DNA
tgtaaaagtaaaaaaaaagg

SEQ ID NO: 17738 - DNA, 20 bp, synthetic construct
  misc_feature 1..20: note = Description of Artificial Sequence: Synthetic oligonucleotide
  misc_feature 1..20: note = Target: ANGPTL4; (+) strand; PAM type: YTN; PAM sequence: TTT
  source 1..20: mol_type = other DNA
gtaaaagtaaaaaaaaaggc

SEQ ID NO: 17739 - DNA, 20 bp, synthetic construct
  misc_feature 1..20: note = Description of Artificial Sequence: Synthetic oligonucleotide
  misc_feature 1..20: note = Target: ANGPTL4; (+) strand; PAM type: YTN; PAM sequence: TTG
  source 1..20: mol_type = other DNA
taaaagtaaaaaaaaaggcc

SEQ ID NO: 17740 - DNA, 20 bp, synthetic construct
  misc_feature 1..20: note = Description of Artificial Sequence: Synthetic oligonucleotide
  misc_feature 1..20: note = Target: ANGPTL4; (+) strand; PAM type: YTN; PAM sequence: CTC
  source 1..20: mol_type = other DNA
acacctgtaatcccagcact

SEQ ID NO: 17741 - DNA, 20 bp, synthetic construct
  misc_feature 1..20: note = Description of Artificial Sequence: Synthetic oligonucleotide
  misc_feature 1..20: note = Target: ANGPTL4; (+) strand; PAM type: YTN; PAM sequence: CTG
  source 1..20: mol_type = other DNA
taatcccagcactttgggag

SEQ ID NO: 17742 - DNA, 20 bp, synthetic construct
  misc_feature 1..20: note = Description of Artificial Sequence: Synthetic oligonucleotide
  misc_feature 1..20: note = Target: ANGPTL4; (+) strand; PAM type: YTN; PAM sequence: CTT
  source 1..20: mol_type = other DNA
tgggaggttgaggcagacag

SEQ ID NO: 17743 - DNA, 20 bp, synthetic construct
  misc_feature 1..20: note = Description of Artificial Sequence: Synthetic oligonucleotide
  misc_feature 1..20: note = Target: ANGPTL4; (+) strand; PAM type: YTN; PAM sequence: TTT
  source 1..20: mol_type = other DNA
gggaggttgaggcagacaga

SEQ ID NO: 17744 - DNA, 20 bp, synthetic construct
  misc_feature 1..20: note = Description of Artificial Sequence: Synthetic oligonucleotide
  misc_feature 1..20: note = Target: ANGPTL4; (+) strand; PAM type: YTN; PAM sequence: TTG
  source 1..20: mol_type = other DNA
ggaggttgaggcagacagat

SEQ ID NO: 17745 - DNA, 20 bp, synthetic construct
  misc_feature 1..20: note = Description of Artificial Sequence: Synthetic oligonucleotide
  misc_feature 1..20: note = Target: ANGPTL4; (+) strand; PAM type: YTN; PAM sequence: TTG
  source 1..20: mol_type = other DNA
aggcagacagatcacgaggt

SEQ ID NO: 17746 - DNA, 20 bp, synthetic construct
  misc_feature 1..20: note = Description of Artificial Sequence: Synthetic oligonucleotide
  misc_feature 1..20: note = Target: ANGPTL4; (+) strand; PAM type: YTN; PAM sequence: TTC
  source 1..20: mol_type = other DNA
gagaccagcctgaccaacat

SEQ ID NO: 17747 - DNA, 20 bp, synthetic construct
  misc_feature 1..20: note = Description of Artificial Sequence: Synthetic oligonucleotide
  misc_feature 1..20: note = Target: ANGPTL4; (+) strand; PAM type: YTN; PAM sequence: CTG
  source 1..20: mol_type = other DNA
accaacatggtgaaaccccg

SEQ ID NO: 17748 - DNA, 20 bp, synthetic construct
  misc_feature 1..20: note = Description of Artificial Sequence: Synthetic oligonucleotide
  misc_feature 1..20: note = Target: ANGPTL4; (+) strand; PAM type: YTN; PAM sequence: CTC
  source 1..20: mol_type = other DNA
tactaaaaatacaaaaatta

SEQ ID NO: 17749 - DNA, 20 bp, synthetic construct
  misc_feature 1..20: note = Description of Artificial Sequence: Synthetic oligonucleotide
  misc_feature 1..20: note = Target: ANGPTL4; (+) strand; PAM type: YTN; PAM sequence: CTA
  source 1..20: mol_type = other DNA
ctaaaaatacaaaaattagc

SEQ ID NO: 17750 - DNA, 20 bp, synthetic construct
  misc_feature 1..20: note = Description of Artificial Sequence: Synthetic oligonucleotide
  misc_feature 1..20: note = Target: ANGPTL4; (+) strand; PAM type: YTN; PAM sequence: CTA
  source 1..20: mol_type = other DNA
aaaatacaaaaattagccgg

SEQ ID NO: 17751 - DNA, 20 bp, synthetic construct
  misc_feature 1..20: note = Description of Artificial Sequence: Synthetic oligonucleotide
  misc_feature 1..20: note = Target: ANGPTL4; (+) strand; PAM type: YTN; PAM sequence: TTA
  source 1..20: mol_type = other DNA
gccgggcatggtggtgtgca

SEQ ID NO: 17752 - DNA, 20 bp, synthetic construct
  misc_feature 1..20: note = Description of Artificial Sequence: Synthetic oligonucleotide
  misc_feature 1..20: note = Target: ANGPTL4; (+) strand; PAM type: YTN; PAM sequence: CTG
  source 1..20: mol_type = other DNA
taatcccagctactcaggtg

SEQ ID NO: 17753 - DNA, 20 bp, synthetic construct
  misc_feature 1..20: note = Description of Artificial Sequence: Synthetic oligonucleotide
  misc_feature 1..20: note = Target: ANGPTL4; (+) strand; PAM type: YTN; PAM sequence: CTA
  source 1..20: mol_type = other DNA
ctcaggtggctgaggcagga

SEQ ID NO: 17754 - DNA, 20 bp, synthetic construct
  misc_feature 1..20: note = Description of Artificial Sequence: Synthetic oligonucleotide
  misc_feature 1..20: note = Target: ANGPTL4; (+) strand; PAM type: YTN; PAM sequence: CTC
  source 1..20: mol_type = other DNA
aggtggctgaggcaggagaa

SEQ ID NO: 17755 - DNA, 20 bp, synthetic construct
  misc_feature 1..20: note = Description of Artificial Sequence: Synthetic oligonucleotide
  misc_feature 1..20: note = Target: ANGPTL4; (+) strand; PAM type: YTN; PAM sequence: CTG
  source 1..20: mol_type = other DNA
aggcaggagaatctcttgaa

SEQ ID NO: 17756 - DNA, 20 bp, synthetic construct
  misc_feature 1..20: note = Description of Artificial Sequence: Synthetic oligonucleotide
  misc_feature 1..20: note = Target: ANGPTL4; (+) strand; PAM type: YTN; PAM sequence: CTC
  source 1..20: mol_type = other DNA
ttgaacctgggaggcagagg

SEQ ID NO: 17757 - DNA, 20 bp, synthetic construct
  misc_feature 1..20: note = Description of Artificial Sequence: Synthetic oligonucleotide
  misc_feature 1..20: note = Target: ANGPTL4; (+) strand; PAM type: YTN; PAM sequence: CTT
  source 1..20: mol_type = other DNA
gaacctgggaggcagaggtt

SEQ ID NO: 17758 - DNA, 20 bp, synthetic construct
  misc_feature 1..20: note = Description of Artificial Sequence: Synthetic oligonucleotide
  misc_feature 1..20: note = Target: ANGPTL4; (+) strand; PAM type: YTN; PAM sequence: TTG
  source 1..20: mol_type = other DNA
aacctgggaggcagaggttg

SEQ ID NO: 17759 - DNA, 20 bp, synthetic construct
  misc_feature 1..20: note = Description of Artificial Sequence: Synthetic oligonucleotide
  misc_feature 1..20: note = Target: ANGPTL4; (+) strand; PAM type: YTN; PAM sequence: CTG
  source 1..20: mol_type = other DNA
ggaggcagaggttgcagtga

SEQ ID NO: 17760 - DNA, 20 bp, synthetic construct
  misc_feature 1..20: note = Description of Artificial Sequence: Synthetic oligonucleotide
  misc_feature 1..20: note = Target: ANGPTL4; (+) strand; PAM type: YTN; PAM sequence: TTG
  source 1..20: mol_type = other DNA
cagtgagctgagatgacgcc

SEQ ID NO: 17761 - DNA, 20 bp, synthetic construct
  misc_feature 1..20: note = Description of Artificial Sequence: Synthetic oligonucleotide
  misc_feature 1..20: note = Target: ANGPTL4; (+) strand; PAM type: YTN; PAM sequence: CTG
  source 1..20: mol_type = other DNA
agatgacgccaccgcactcc

SEQ ID NO: 17762 - DNA, 20 bp, synthetic construct
  misc_feature 1..20: note = Description of Artificial Sequence: Synthetic oligonucleotide
  misc_feature 1..20: note = Target: ANGPTL4; (+) strand; PAM type: YTN; PAM sequence: CTC
  source 1..20: mol_type = other DNA
cagcctgggcgacagagcga

SEQ ID NO: 17763 - DNA, 20 bp, synthetic construct
  misc_feature 1..20: note = Description of Artificial Sequence: Synthetic oligonucleotide
  misc_feature 1..20: note = Target: ANGPTL4; (+) strand; PAM type: YTN; PAM sequence: CTG
  source 1..20: mol_type = other DNA
ggcgacagagcgagactccg

SEQ ID NO: 17764 - DNA, 20 bp, synthetic construct
  misc_feature 1..20: note = Description of Artificial Sequence: Synthetic oligonucleotide
  misc_feature 1..20: note = Target: ANGPTL4; (+) strand; PAM type: YTN; PAM sequence: CTC
  source 1..20: mol_type = other DNA
cgtccccccatcaaaaaaat

SEQ ID NO: 17765 - DNA, 20 bp, synthetic construct
  misc_feature 1..20: note = Description of Artificial Sequence: Synthetic oligonucleotide
  misc_feature 1..20: note = Target: ANGPTL4; (+) strand; PAM type: YTN; PAM sequence: TTC
  source 1..20: mol_type = other DNA
agcccttgctgggcatggtg

SEQ ID NO: 17766 - DNA, 20 bp, synthetic construct
  misc_feature 1..20: note = Description of Artificial Sequence: Synthetic oligonucleotide
  misc_feature 1..20: note = Target: ANGPTL4; (+) strand; PAM type: YTN; PAM sequence: CTT
  source 1..20: mol_type = other DNA
gctgggcatggtggcacatg

SEQ ID NO: 17767 - DNA, 20 bp, synthetic construct
  misc_feature 1..20: note = Description of Artificial Sequence: Synthetic oligonucleotide
  misc_feature 1..20: note = Target: ANGPTL4; (+) strand; PAM type: YTN; PAM sequence: TTG
  source 1..20: mol_type = other DNA
ctgggcatggtggcacatgc

SEQ ID NO: 17768 - DNA, 20 bp, synthetic construct
  misc_feature 1..20: note = Description of Artificial Sequence: Synthetic oligonucleotide
  misc_feature 1..20: note = Target: ANGPTL4; (+) strand; PAM type: YTN; PAM sequence: CTG
  source 1..20: mol_type = other DNA
ggcatggtggcacatgcctg

SEQ ID NO: 17769 - DNA, 20 bp, synthetic construct
  misc_feature 1..20: note = Description of Artificial Sequence: Synthetic oligonucleotide
  misc_feature 1..20: note = Target: ANGPTL4; (+) strand; PAM type: YTN; PAM sequence: CTG
  source 1..20: mol_type = other DNA
tagtcccagctactcgggag

SEQ ID NO: 17770 - DNA, 20 bp, synthetic construct
  misc_feature 1..20: note = Description of Artificial Sequence: Synthetic oligonucleotide
  misc_feature 1..20: note = Target: ANGPTL4; (+) strand; PAM type: YTN; PAM sequence: CTA
  source 1..20: mol_type = other DNA
ctcgggaggccaaggcagga

SEQ ID NO: 17771 - DNA, 20 bp, synthetic construct
  misc_feature 1..20: note = Description of Artificial Sequence: Synthetic oligonucleotide
  misc_feature 1..20: note = Target: ANGPTL4; (+) strand; PAM type: YTN; PAM sequence: CTC
  source 1..20: mol_type = other DNA
gggaggccaaggcaggaggg

SEQ ID NO: 17772 - DNA, 20 bp, synthetic construct
  misc_feature 1..20: note = Description of Artificial Sequence: Synthetic oligonucleotide
  misc_feature 1..20: note = Target: ANGPTL4; (+) strand; PAM type: YTN; PAM sequence: CTT
  source 1..20: mol_type = other DNA
cagcccaggagttaaaggct

SEQ ID NO: 17773 - DNA, 20 bp, synthetic construct
  misc_feature 1..20: note = Description of Artificial Sequence: Synthetic oligonucleotide
  misc_feature 1..20: note = Target: ANGPTL4; (+) strand; PAM type: YTN; PAM sequence: TTC
  source 1..20: mol_type = other DNA
agcccaggagttaaaggctg

SEQ ID NO: 17774 - DNA, 20 bp, synthetic construct
  misc_feature 1..20: note = Description of Artificial Sequence: Synthetic oligonucleotide
  misc_feature 1..20: note = Target: ANGPTL4; (+) strand; PAM type: YTN; PAM sequence: TTA
  source 1..20: mol_type = other DNA
aaggctgccgtgagccgtga

SEQ ID NO: 17775 - DNA, 20 bp, synthetic construct
  misc_feature 1..20: note = Description of Artificial Sequence: Synthetic oligonucleotide
  misc_feature 1..20: note = Target: ANGPTL4; (+) strand; PAM type: YTN; PAM sequence: CTG
  source 1..20: mol_type = other DNA
ccgtgagccgtgatcacacc

SEQ ID NO: 17776 - DNA, 20 bp, synthetic construct
  misc_feature 1..20: note = Description of Artificial Sequence: Synthetic oligonucleotide
  misc_feature 1..20: note = Target: ANGPTL4; (+) strand; PAM type: YTN; PAM sequence: CTG
  source 1..20: mol_type = other DNA
tgaatagccaccgcactcca

SEQ ID NO: 17777 - DNA, 20 bp, synthetic construct
  misc_feature 1..20: note = Description of Artificial Sequence: Synthetic oligonucleotide
  misc_feature 1..20: note = Target: ANGPTL4; (+) strand; PAM type: YTN; PAM sequence: CTC
  source 1..20: mol_type = other DNA
caacctgggcaacacaacaa

SEQ ID NO: 17778 - DNA, 20 bp, synthetic construct
  misc_feature 1..20: note = Description of Artificial Sequence: Synthetic oligonucleotide
  misc_feature 1..20: note = Target: ANGPTL4; (+) strand; PAM type: YTN; PAM sequence: CTG
  source 1..20: mol_type = other DNA
ggcaacacaacaaaacctcg

SEQ ID NO: 17779 - DNA, 20 bp, synthetic construct
  misc_feature 1..20: note = Description of Artificial Sequence: Synthetic oligonucleotide
  misc_feature 1..20: note = Target: ANGPTL4; (+) strand; PAM type: YTN; PAM sequence: CTC
  source 1..20: mol_type = other DNA
gtttctaaaaaaaaacaaag

SEQ ID NO: 17780 - DNA, 20 bp, synthetic construct
  misc_feature 1..20: note = Description of Artificial Sequence: Synthetic oligonucleotide
  misc_feature 1..20: note = Target: ANGPTL4; (+) strand; PAM type: YTN; PAM sequence: TTT
  source 1..20: mol_type = other DNA
ctaaaaaaaaacaaaggctg

SEQ ID NO: 17781 - DNA, 20 bp, synthetic construct
  misc_feature 1..20: note = Description of Artificial Sequence: Synthetic oligonucleotide
  misc_feature 1..20: note = Target: ANGPTL4; (+) strand; PAM type: YTN; PAM sequence: TTC
  source 1..20: mol_type = other DNA
taaaaaaaaacaaaggctga

SEQ ID NO: 17782 - DNA, 20 bp, synthetic construct
  misc_feature 1..20: note = Description of Artificial Sequence: Synthetic oligonucleotide
  misc_feature 1..20: note = Target: ANGPTL4; (+) strand; PAM type: YTN; PAM sequence: CTA
  source 1..20: mol_type = other DNA
aaaaaaaacaaaggctgagc

SEQ ID NO: 17783 - DNA, 20 bp, synthetic construct
  misc_feature 1..20: note = Description of Artificial Sequence: Synthetic oligonucleotide
  misc_feature 1..20: note = Target: ANGPTL4; (+) strand; PAM type: YTN; PAM sequence: CTG
  source 1..20: mol_type = other DNA
agcacggtggcttacacctg

SEQ ID NO: 17784 - DNA, 20 bp, synthetic construct
  misc_feature 1..20: note = Description of Artificial Sequence: Synthetic oligonucleotide
  misc_feature 1..20: note = Target: ANGPTL4; (+) strand; PAM type: YTN; PAM sequence: CTT
  source 1..20: mol_type = other DNA
acacctgaaatgccagcact

SEQ ID NO: 17785 - DNA, 20 bp, synthetic construct
  misc_feature 1..20: note = Description of Artificial Sequence: Synthetic oligonucleotide
  misc_feature 1..20: note = Target: ANGPTL4; (+) strand; PAM type: YTN; PAM sequence: TTA
  source 1..20: mol_type = other DNA
cacctgaaatgccagcactt

SEQ ID NO: 17786 - DNA, 20 bp, synthetic construct
  misc_feature 1..20: note = Description of Artificial Sequence: Synthetic oligonucleotide
  misc_feature 1..20: note = Target: ANGPTL4; (+) strand; PAM type: YTN; PAM sequence: CTG
  source 1..20: mol_type = other DNA
aaatgccagcactttgggag

SEQ ID NO: 17787 - DNA, 20 bp, synthetic construct
  misc_feature 1..20: note = Description of Artificial Sequence: Synthetic oligonucleotide
  misc_feature 1..20: note = Target: ANGPTL4; (+) strand; PAM type: YTN; PAM sequence: CTT
  source 1..20: mol_type = other DNA
tgggaggctgaggcgggcaa

SEQ ID NO: 17788 - DNA, 20 bp, synthetic construct
  misc_feature 1..20: note = Description of Artificial Sequence: Synthetic oligonucleotide
  misc_feature 1..20: note = Target: ANGPTL4; (+) strand; PAM type: YTN; PAM sequence: TTT
  source 1..20: mol_type = other DNA
gggaggctgaggcgggcaaa

SEQ ID NO: 17789 - DNA, 20 bp, synthetic construct
  misc_feature 1..20: note = Description of Artificial Sequence: Synthetic oligonucleotide
  misc_feature 1..20: note = Target: ANGPTL4; (+) strand; PAM type: YTN; PAM sequence: TTG
  source 1..20: mol_type = other DNA
ggaggctgaggcgggcaaat

SEQ ID NO: 17790 - DNA, 20 bp, synthetic construct
  misc_feature 1..20: note = Description of Artificial Sequence: Synthetic oligonucleotide
  misc_feature 1..20: note = Target: ANGPTL4; (+) strand; PAM type: YTN; PAM sequence: CTG
  source 1..20: mol_type = other DNA
aggcgggcaaatcacttgag

SEQ ID NO: 17791 - DNA, 20 bp, synthetic construct
  misc_feature 1..20: note = Description of Artificial Sequence: Synthetic oligonucleotide
  misc_feature 1..20: note = Target: ANGPTL4; (+) strand; PAM type: YTN; PAM sequence: CTT
  source 1..20: mol_type = other DNA
gaggtcagaagttcaagacc

SEQ ID NO: 17792 - DNA, 20 bp, synthetic construct
  misc_feature 1..20: note = Description of Artificial Sequence: Synthetic oligonucleotide
  misc_feature 1..20: note = Target: ANGPTL4; (+) strand; PAM type: YTN; PAM sequence: TTG
  source 1..20: mol_type = other DNA
aggtcagaagttcaagacca

SEQ ID NO: 17793 - DNA, 20 bp, synthetic construct
  misc_feature 1..20: note = Description of Artificial Sequence: Synthetic oligonucleotide
  misc_feature 1..20: note = Target: ANGPTL4; (+) strand; PAM type: YTN; PAM sequence: TTC
  source 1..20: mol_type = other DNA
aagaccagcctggccaacat

SEQ ID NO: 17794 - DNA, 20 bp, synthetic construct
  misc_feature 1..20: note = Description of Artificial Sequence: Synthetic oligonucleotide
  misc_feature 1..20: note = Target: ANGPTL4; (+) strand; PAM type: YTN; PAM sequence: CTG
  source 1..20: mol_type = other DNA
gccaacatggtgaaacccta

SEQ ID NO: 17795 - DNA, 20 bp, synthetic construct
  misc_feature 1..20: note = Description of Artificial Sequence: Synthetic oligonucleotide
  misc_feature 1..20: note = Target: ANGPTL4; (+) strand; PAM type: YTN; PAM sequence: CTA
  source 1..20: mol_type = other DNA
tctctaccaacataaacatt

SEQ ID NO: 17796 - DNA, 20 bp, synthetic construct
  misc_feature 1..20: note = Description of Artificial Sequence: Synthetic oligonucleotide
  misc_feature 1..20: note = Target: ANGPTL4; (+) strand; PAM type: YTN; PAM sequence: CTC
  source 1..20: mol_type = other DNA
taccaacataaacattagcc

SEQ ID NO: 17797 - DNA, 20 bp, synthetic construct
  misc_feature 1..20: note = Description of Artificial Sequence: Synthetic oligonucleotide
  misc_feature 1..20: note = Target: ANGPTL4; (+) strand; PAM type: YTN; PAM sequence: CTA
  source 1..20: mol_type = other DNA
ccaacataaacattagccgg

SEQ ID NO: 17798 - DNA, 20 bp, synthetic construct
  misc_feature 1..20: note = Description of Artificial Sequence: Synthetic oligonucleotide
  misc_feature 1..20: note = Target: ANGPTL4; (+) strand; PAM type: YTN; PAM sequence: TTA
  source 1..20: mol_type = other DNA
gccgggcgtgcctgtgattc

SEQ ID NO: 17799 - DNA, 20 bp, synthetic construct
  misc_feature 1..20: note = Description of Artificial Sequence: Synthetic oligonucleotide
  misc_feature 1..20: note = Target: ANGPTL4; (+) strand; PAM type: YTN; PAM sequence: CTG
  source 1..20: mol_type = other DNA
tgattccagctgcttgtggg

SEQ ID NO: 17800 - DNA, 20 bp, synthetic construct
  misc_feature 1..20: note = Description of Artificial Sequence: Synthetic oligonucleotide
  misc_feature 1..20: note = Target: ANGPTL4; (+) strand; PAM type: YTN; PAM sequence: TTC
  source 1..20: mol_type = other DNA
cagctgcttgtggggctgaa

SEQ ID NO: 17801 - DNA, 20 bp, synthetic construct
  misc_feature 1..20: note = Description of Artificial Sequence: Synthetic oligonucleotide
  misc_feature 1..20: note = Target: ANGPTL4; (+) strand; PAM type: YTN; PAM sequence: CTG
  source 1..20: mol_type = other DNA
cttgtggggctgaagcacaa

SEQ ID NO: 17802 - DNA, 20 bp, synthetic construct
  misc_feature 1..20: note = Description of Artificial Sequence: Synthetic oligonucleotide
  misc_feature 1..20: note = Target: ANGPTL4; (+) strand; PAM type: YTN; PAM sequence: CTT
  source 1..20: mol_type = other DNA
gtggggctgaagcacaagaa

SEQ ID NO: 17803 - DNA, 20 bp, synthetic construct
  misc_feature 1..20: note = Description of Artificial Sequence: Synthetic oligonucleotide
  misc_feature 1..20: note = Target: ANGPTL4; (+) strand; PAM type: YTN; PAM sequence: TTG
  source 1..20: mol_type = other DNA
tggggctgaagcacaagaat

SEQ ID NO: 17804 - DNA, 20 bp, synthetic construct
  misc_feature 1..20: note = Description of Artificial Sequence: Synthetic oligonucleotide
  misc_feature 1..20: note = Target: ANGPTL4; (+) strand; PAM type: YTN; PAM sequence: CTG
  source 1..20: mol_type = other DNA
aagcacaagaatcgcttgag

SEQ ID NO: 17805 - DNA, 20 bp, synthetic construct
  misc_feature 1..20: note = Description of Artificial Sequence: Synthetic oligonucleotide
  misc_feature 1..20: note = Target: ANGPTL4; (+) strand; PAM type: YTN; PAM sequence: CTT
  source 1..20: mol_type = other DNA
gagccccgaaggcagaggtt

SEQ ID NO: 17806 - DNA, 20 bp, synthetic construct
  misc_feature 1..20: note = Description of Artificial Sequence: Synthetic oligonucleotide
  misc_feature 1..20: note = Target: ANGPTL4; (+) strand; PAM type: YTN; PAM sequence: TTG
  source 1..20: mol_type = other DNA
agccccgaaggcagaggttg

SEQ ID NO: 17807 - DNA, 20 bp, synthetic construct
  misc_feature 1..20: note = Description of Artificial Sequence: Synthetic oligonucleotide
  misc_feature 1..20: note = Target: ANGPTL4; (+) strand; PAM type: YTN; PAM sequence: TTG
  source 1..20: mol_type = other DNA
cagtgagctgagattgcggc

SEQ ID NO: 17808 - DNA, 20 bp, synthetic construct
  misc_feature 1..20: note = Description of Artificial Sequence: Synthetic oligonucleotide
  misc_feature 1..20: note = Target: ANGPTL4; (+) strand; PAM type: YTN; PAM sequence: CTG
  source 1..20: mol_type = other DNA
agattgcggcactgcgatcc

SEQ ID NO: 17809 - DNA, 20 bp, synthetic construct
  misc_feature 1..20: note = Description of Artificial Sequence: Synthetic oligonucleotide
  misc_feature 1..20: note = Target: ANGPTL4; (+) strand; PAM type: YTN; PAM sequence: TTG
  source 1..20: mol_type = other DNA
cggcactgcgatccagcctg

SEQ ID NO: 17810 - DNA, 20 bp, synthetic construct
  misc_feature 1..20: note = Description of Artificial Sequence: Synthetic oligonucleotide
  misc_feature 1..20: note = Target: ANGPTL4; (+) strand; PAM type: YTN; PAM sequence: CTG
  source 1..20: mol_type = other DNA
cgatccagcctgggcaacag

SEQ ID NO: 17811 - DNA, 20 bp, synthetic construct
  misc_feature 1..20: note = Description of Artificial Sequence: Synthetic oligonucleotide
  misc_feature 1..20: note = Target: ANGPTL4; (+) strand; PAM type: YTN; PAM sequence: CTG
  source 1..20: mol_type = other DNA
ggcaacagagtgagactcca

SEQ ID NO: 17812 - DNA, 20 bp, synthetic construct
  misc_feature 1..20: note = Description of Artificial Sequence: Synthetic oligonucleotide
  misc_feature 1..20: note = Target: ANGPTL4; (+) strand; PAM type: YTN; PAM sequence: CTC
  source 1..20: mol_type = other DNA
catctctaaaaaaaaaaaaa

SEQ ID NO: 17813 - DNA, 20 bp, synthetic construct
  misc_feature 1..20: note = Description of Artificial Sequence: Synthetic oligonucleotide
  misc_feature 1..20: note = Target: ANGPTL4; (+) strand; PAM type: YTN; PAM sequence: CTC
  source 1..20: mol_type = other DNA
taaaaaaaaaaaaaaaaaaa

SEQ ID NO: 17814 - DNA, 20 bp, synthetic construct
  misc_feature 1..20: note = Description of Artificial Sequence: Synthetic oligonucleotide
  misc_feature 1..20: note = Target: ANGPTL4; (+) strand; PAM type: YTN; PAM sequence: CTA
  source 1..20: mol_type = other DNA
aaaaaaaaaaaaaaaaaaaa

SEQ ID NO: 17815 - DNA, 20 bp, synthetic construct
  misc_feature 1..20: note = Description of Artificial Sequence: Synthetic oligonucleotide
  misc_feature 1..20: note = Target: ANGPTL4; (+) strand; PAM type: YTN; PAM sequence: CTT
  source 1..20: mol_type = other DNA
ttttttccactgagaagtcc

SEQ ID NO: 17816 - DNA, 20 bp, synthetic construct
  misc_feature 1..20: note = Description of Artificial Sequence: Synthetic oligonucleotide
  misc_feature 1..20: note = Target: ANGPTL4; (+) strand; PAM type: YTN; PAM sequence: TTT
  source 1..20: mol_type = other DNA
tttttccactgagaagtcct

SEQ ID NO: 17817 - DNA, 20 bp, synthetic construct
  misc_feature 1..20: note = Description of Artificial Sequence: Synthetic oligonucleotide
  misc_feature 1..20: note = Target: ANGPTL4; (+) strand; PAM type: YTN; PAM sequence: TTT
  source 1..20: mol_type = other DNA
ttttccactgagaagtcctt

SEQ ID NO: 17818 - DNA, 20 bp, synthetic construct
  misc_feature 1..20: note = Description of Artificial Sequence: Synthetic oligonucleotide
  misc_feature 1..20: note = Target: ANGPTL4; (+) strand; PAM type: YTN; PAM sequence: TTT
  source 1..20: mol_type = other DNA
tttccactgagaagtccttt

SEQ ID NO: 17819 - DNA, 20 bp, synthetic construct
  misc_feature 1..20: note = Description of Artificial Sequence: Synthetic oligonucleotide
  misc_feature 1..20: note = Target: ANGPTL4; (+) strand; PAM type: YTN; PAM sequence: TTT
  source 1..20: mol_type = other DNA
ttccactgagaagtcctttc

SEQ ID NO: 17820 - DNA, 20 bp, synthetic construct
  misc_feature 1..20: note = Description of Artificial Sequence: Synthetic oligonucleotide
  misc_feature 1..20: note = Target: ANGPTL4; (+) strand; PAM type: YTN; PAM sequence: TTT
  source 1..20: mol_type = other DNA
tccactgagaagtcctttcc

SEQ ID NO: 17821 - DNA, 20 bp, synthetic construct
  misc_feature 1..20: note = Description of Artificial Sequence: Synthetic oligonucleotide
  misc_feature 1..20: note = Target: ANGPTL4; (+) strand; PAM type: YTN; PAM sequence: TTT
  source 1..20: mol_type = other DNA
ccactgagaagtcctttcca

SEQ ID NO: 17822 - DNA, 20 bp, synthetic construct
  misc_feature 1..20: note = Description of Artificial Sequence: Synthetic oligonucleotide
  misc_feature 1..20: note = Target: ANGPTL4; (+) strand; PAM type: YTN; PAM sequence: TTC
  source 1..20: mol_type = other DNA
cactgagaagtcctttccat

SEQ ID NO: 17823 - DNA, 20 bp, synthetic construct
  misc_feature 1..20: note = Description of Artificial Sequence: Synthetic oligonucleotide
  misc_feature 1..20: note = Target: ANGPTL4; (+) strand; PAM type: YTN; PAM sequence: CTG
  source 1..20: mol_type = other DNA
agaagtcctttccattacaa

SEQ ID NO: 17824 - DNA, 20 bp, synthetic construct
  misc_feature 1..20: note = Description of Artificial Sequence: Synthetic oligonucleotide
  misc_feature 1..20: note = Target: ANGPTL4; (+) strand; PAM type: YTN; PAM sequence: CTT
  source 1..20: mol_type = other DNA
tccattacaagaggttacaa

SEQ ID NO: 17825 - DNA, 20 bp, synthetic construct
  misc_feature 1..20: note = Description of Artificial Sequence: Synthetic oligonucleotide
  misc_feature 1..20: note = Target: ANGPTL4; (+) strand; PAM type: YTN; PAM sequence: TTT
  source 1..20: mol_type = other DNA
ccattacaagaggttacaac

SEQ ID NO: 17826 - DNA, 20 bp, synthetic construct
  misc_feature 1..20: note = Description of Artificial Sequence: Synthetic oligonucleotide
  misc_feature 1..20: note = Target: ANGPTL4; (+) strand; PAM type: YTN; PAM sequence: TTC
  source 1..20: mol_type = other DNA
cattacaagaggttacaaca

SEQ ID NO: 17827 - DNA, 20 bp, synthetic construct
  misc_feature 1..20: note = Description of Artificial Sequence: Synthetic oligonucleotide
  misc_feature 1..20: note = Target: ANGPTL4; (+) strand; PAM type: YTN; PAM sequence: TTA
  source 1..20: mol_type = other DNA
caagaggttacaacacgggg

SEQ ID NO: 17828 - DNA, 20 bp, synthetic construct
  misc_feature 1..20: note = Description of Artificial Sequence: Synthetic oligonucleotide
  misc_feature 1..20: note = Target: ANGPTL4; (+) strand; PAM type: YTN; PAM sequence: TTA
  source 1..20: mol_type = other DNA
caacacggggttttacccag

SEQ ID NO: 17829 - DNA, 20 bp, synthetic construct
  misc_feature 1..20: note = Description of Artificial Sequence: Synthetic oligonucleotide
  misc_feature 1..20: note = Target: ANGPTL4; (+) strand; PAM type: YTN; PAM sequence: TTT
  source 1..20: mol_type = other DNA
tacccagttcagctggccca

SEQ ID NO: 17830 - DNA, 20 bp, synthetic construct
  misc_feature 1..20: note = Description of Artificial Sequence: Synthetic oligonucleotide
  misc_feature 1..20: note = Target: ANGPTL4; (+) strand; PAM type: YTN; PAM sequence: TTT
  source 1..20: mol_type = other DNA
acccagttcagctggcccag

SEQ ID NO: 17831 - DNA, 20 bp, synthetic construct
  misc_feature 1..20: note = Description of Artificial Sequence: Synthetic oligonucleotide
  misc_feature 1..20: note = Target: ANGPTL4; (+) strand; PAM type: YTN; PAM sequence: TTA
  source 1..20: mol_type = other DNA
cccagttcagctggcccaga

SEQ ID NO: 17832 - DNA, 20 bp, synthetic construct
  misc_feature 1..20: note = Description of Artificial Sequence: Synthetic oligonucleotide
  misc_feature 1..20: note = Target: ANGPTL4; (+) strand; PAM type: YTN; PAM sequence: TTC
  source 1..20: mol_type = other DNA
agctggcccagagaggcttt

SEQ ID NO: 17833 - DNA, 20 bp, synthetic construct
  misc_feature 1..20: note = Description of Artificial Sequence: Synthetic oligonucleotide
  misc_feature 1..20: note = Target: ANGPTL4; (+) strand; PAM type: YTN; PAM sequence: CTG
  source 1..20: mol_type = other DNA
gcccagagaggctttgcaga

SEQ ID NO: 17834 - DNA, 20 bp, synthetic construct
  misc_feature 1..20: note = Description of Artificial Sequence: Synthetic oligonucleotide
  misc_feature 1..20: note = Target: ANGPTL4; (+) strand; PAM type: YTN; PAM sequence: CTT
  source 1..20: mol_type = other DNA
tgcagatttccactgcctac

SEQ ID NO: 17835 - DNA, 20 bp, synthetic construct
  misc_feature 1..20: note = Description of Artificial Sequence: Synthetic oligonucleotide
  misc_feature 1..20: note = Target: ANGPTL4; (+) strand; PAM type: YTN; PAM sequence: TTT
  source 1..20: mol_type = other DNA
gcagatttccactgcctact

SEQ ID NO: 17836 - DNA, 20 bp, synthetic construct
  misc_feature 1..20: note = Description of Artificial Sequence: Synthetic oligonucleotide
  misc_feature 1..20: note = Target: ANGPTL4; (+) strand; PAM type: YTN; PAM sequence: TTG
  source 1..20: mol_type = other DNA
cagatttccactgcctactc

SEQ ID NO: 17837 - DNA, 20 bp, synthetic construct
  misc_feature 1..20: note = Description of Artificial Sequence: Synthetic oligonucleotide
  misc_feature 1..20: note = Target: ANGPTL4; (+) strand; PAM type: YTN; PAM sequence: TTT
  source 1..20: mol_type = other DNA
ccactgcctactccctccca

SEQ ID NO: 17838 - DNA, 20 bp, synthetic construct
  misc_feature 1..20: note = Description of Artificial Sequence: Synthetic oligonucleotide
  misc_feature 1..20: note = Target: ANGPTL4; (+) strand; PAM type: YTN; PAM sequence: TTC
  source 1..20: mol_type = other DNA
cactgcctactccctcccac

SEQ ID NO: 17839 - DNA, 20 bp, synthetic construct
  misc_feature 1..20: note = Description of Artificial Sequence: Synthetic oligonucleotide
  misc_feature 1..20: note = Target: ANGPTL4; (+) strand; PAM type: YTN; PAM sequence: CTG
  source 1..20: mol_type = other DNA
cctactccctcccacactca

SEQ ID NO: 17840 - DNA, 20 bp, synthetic construct
  misc_feature 1..20: note = Description of Artificial Sequence: Synthetic oligonucleotide
  misc_feature 1..20: note = Target: ANGPTL4; (+) strand; PAM type: YTN; PAM sequence: CTA
  source 1..20: mol_type = other DNA
ctccctcccacactcagtcc

SEQ ID NO: 17841 - DNA, 20 bp, synthetic construct
  misc_feature 1..20: note = Description of Artificial Sequence: Synthetic oligonucleotide
  misc_feature 1..20: note = Target: ANGPTL4; (+) strand; PAM type: YTN; PAM sequence: CTC
  source 1..20: mol_type = other DNA
cctcccacactcagtccctg

SEQ ID NO: 17842 - DNA, 20 bp, synthetic construct
  misc_feature 1..20: note = Description of Artificial Sequence: Synthetic oligonucleotide
  misc_feature 1..20: note = Target: ANGPTL4; (+) strand; PAM type: YTN; PAM sequence: CTC
  source 1..20: mol_type = other DNA
ccacactcagtccctgctgg

SEQ ID NO: 17843 - DNA, 20 bp, synthetic construct
  misc_feature 1..20: note = Description of Artificial Sequence: Synthetic oligonucleotide
  misc_feature 1..20: note = Target: ANGPTL4; (+) strand; PAM type: YTN; PAM sequence: CTC
  source 1..20: mol_type = other DNA
agtccctgctgggttcttgg

SEQ ID NO: 17844 - DNA, 20 bp, synthetic construct
  misc_feature 1..20: note = Description of Artificial Sequence: Synthetic oligonucleotide
  misc_feature 1..20: note = Target: ANGPTL4; (+) strand; PAM type: YTN; PAM sequence: CTG
  source 1..20: mol_type = other DNA
ctgggttcttgggacaaaga

SEQ ID NO: 17845 - DNA, 20 bp, synthetic construct
  misc_feature 1..20: note = Description of Artificial Sequence: Synthetic oligonucleotide
  misc_feature 1..20: note = Target: ANGPTL4; (+) strand; PAM type: YTN; PAM sequence: CTG
  source 1..20: mol_type = other DNA
ggttcttgggacaaagatct

SEQ ID NO: 17846 - DNA, 20 bp, synthetic construct
  misc_feature 1..20: note = Description of Artificial Sequence: Synthetic oligonucleotide
  misc_feature 1..20: note = Target: ANGPTL4; (+) strand; PAM type: YTN; PAM sequence: TTC
  source 1..20: mol_type = other DNA
ttgggacaaagatcttccca

SEQ ID NO: 17847 - DNA, 20 bp, synthetic construct
  misc_feature 1..20: note = Description of Artificial Sequence: Synthetic oligonucleotide
  misc_feature 1..20: note = Target: ANGPTL4; (+) strand; PAM type: YTN; PAM sequence: CTT
  source 1..20: mol_type = other DNA
gggacaaagatcttcccaag

SEQ ID NO: 17848 - DNA, 20 bp, synthetic construct
  misc_feature 1..20: note = Description of Artificial Sequence: Synthetic oligonucleotide
  misc_feature 1..20: note = Target: ANGPTL4; (+) strand; PAM type: YTN; PAM sequence: TTG
  source 1..20: mol_type = other DNA
ggacaaagatcttcccaagg

SEQ ID NO: 17849 - DNA, 20 bp, synthetic construct
  misc_feature 1..20: note = Description of Artificial Sequence: Synthetic oligonucleotide
  misc_feature 1..20: note = Target: ANGPTL4; (+) strand; PAM type: YTN; PAM sequence: CTT
  source 1..20: mol_type = other DNA
cccaaggccagcccataata

SEQ ID NO: 17850 - DNA, 20 bp, synthetic construct
  misc_feature 1..20: note = Description of Artificial Sequence: Synthetic oligonucleotide
  misc_feature 1..20: note = Target: ANGPTL4; (+) strand; PAM type: YTN; PAM sequence: TTC
  source 1..20: mol_type = other DNA
ccaaggccagcccataatat

SEQ ID NO: 17851 - DNA, 20 bp, synthetic construct
  misc_feature 1..20: note = Description of Artificial Sequence: Synthetic oligonucleotide
  misc_feature 1..20: note = Target: ANGPTL4; (+) strand; PAM type: YTN; PAM sequence: TTC
  source 1..20: mol_type = other DNA
ctccctctgacccaccctcc

SEQ ID NO: 17852 - DNA, 20 bp, synthetic construct
  misc_feature 1..20: note = Description of Artificial Sequence: Synthetic oligonucleotide
  misc_feature 1..20: note = Target: ANGPTL4; (+) strand; PAM type: YTN; PAM sequence: CTC
  source 1..20: mol_type = other DNA
cctctgacccaccctcctcg

SEQ ID NO: 17853 - DNA, 20 bp, synthetic construct
  misc_feature 1..20: note = Description of Artificial Sequence: Synthetic oligonucleotide
  misc_feature 1..20: note = Target: ANGPTL4; (+) strand; PAM type: YTN; PAM sequence: CTC
  source 1..20: mol_type = other DNA
tgacccaccctcctcgagtc

SEQ ID NO: 17854 - DNA, 20 bp, synthetic construct
  misc_feature 1..20: note = Description of Artificial Sequence: Synthetic oligonucleotide
  misc_feature 1..20: note = Target: ANGPTL4; (+) strand; PAM type: YTN; PAM sequence: CTG
  source 1..20: mol_type = other DNA
acccaccctcctcgagtcct

SEQ ID NO: 17855 - DNA, 20 bp, synthetic construct
  misc_feature 1..20: note = Description of Artificial Sequence: Synthetic oligonucleotide
  misc_feature 1..20: note = Target: ANGPTL4; (+) strand; PAM type: YTN; PAM sequence: CTC
  source 1..20: mol_type = other DNA
ctcgagtcctccagggatga

SEQ ID NO: 17856 - DNA, 20 bp, synthetic construct
  misc_feature 1..20: note = Description of Artificial Sequence: Synthetic oligonucleotide
  misc_feature 1..20: note = Target: ANGPTL4; (+) strand; PAM type: YTN; PAM sequence: CTC
  source 1..20: mol_type = other DNA
gagtcctccagggatgagtg

SEQ ID NO: 17857 - DNA, 20 bp, synthetic construct
  misc_feature 1..20: note = Description of Artificial Sequence: Synthetic oligonucleotide
  misc_feature 1..20: note = Target: ANGPTL4; (+) strand; PAM type: YTN; PAM sequence: CTC
  source 1..20: mol_type = other DNA
cagggatgagtgagggagct

SEQ ID NO: 17858 - DNA, 20 bp, synthetic construct
  misc_feature 1..20: note = Description of Artificial Sequence: Synthetic oligonucleotide
  misc_feature 1..20: note = Target: ANGPTL4; (+) strand; PAM type: YTN; PAM sequence: CTG
  source 1..20: mol_type = other DNA
ctgtcttcctgggtttggag

SEQ ID NO: 17859 - DNA, 20 bp, synthetic construct
  misc_feature 1..20: note = Description of Artificial Sequence: Synthetic oligonucleotide
  misc_feature 1..20: note = Target: ANGPTL4; (+) strand; PAM type: YTN; PAM sequence: CTG
  source 1..20: mol_type = other DNA
tcttcctgggtttggagggg

SEQ ID NO: 17860 - DNA, 20 bp, synthetic construct
  misc_feature 1..20: note = Description of Artificial Sequence: Synthetic oligonucleotide
  misc_feature 1..20: note = Target: ANGPTL4; (+) strand; PAM type: YTN; PAM sequence: CTT
  source 1..20: mol_type = other DNA
cctgggtttggagggggttt

SEQ ID NO: 17861 - DNA, 20 bp, synthetic construct
  misc_feature 1..20: note = Description of Artificial Sequence: Synthetic oligonucleotide
  misc_feature 1..20: note = Target: ANGPTL4; (+) strand; PAM type: YTN; PAM sequence: TTC
  source 1..20: mol_type = other DNA
ctgggtttggagggggtttg

SEQ ID NO: 17862 - DNA, 20 bp, synthetic construct
  misc_feature 1..20: note = Description of Artificial Sequence: Synthetic oligonucleotide
  misc_feature 1..20: note = Target: ANGPTL4; (+) strand; PAM type: YTN; PAM sequence: CTG
  source 1..20: mol_type = other DNA
ggtttggagggggtttggtg

SEQ ID NO: 17863 - DNA, 20 bp, synthetic construct
  misc_feature 1..20: note = Description of Artificial Sequence: Synthetic oligonucleotide
  misc_feature 1..20: note = Target: ANGPTL4; (+) strand; PAM type: YTN; PAM sequence: TTT
  source 1..20: mol_type = other DNA
ggagggggtttggtgcttgg

SEQ ID NO: 17864 - DNA, 20 bp, synthetic construct
  misc_feature 1..20: note = Description of Artificial Sequence: Synthetic oligonucleotide
  misc_feature 1..20: note = Target: ANGPTL4; (+) strand; PAM type: YTN; PAM sequence: TTG
  source 1..20: mol_type = other DNA
gagggggtttggtgcttggc

SEQ ID NO: 17865 - DNA, 20 bp, synthetic construct
  misc_feature 1..20: note = Description of Artificial Sequence: Synthetic oligonucleotide
  misc_feature 1..20: note = Target: ANGPTL4; (+) strand; PAM type: YTN; PAM sequence: TTT
  source 1..20: mol_type = other DNA
ggtgcttggcagccagatga

SEQ ID NO: 17866 - DNA, 20 bp, synthetic construct
  misc_feature 1..20: note = Description of Artificial Sequence: Synthetic oligonucleotide
  misc_feature 1..20: note = Target: ANGPTL4; (+) strand; PAM type: YTN; PAM sequence: TTG
  source 1..20: mol_type = other DNA
gtgcttggcagccagatgag

SEQ ID NO: 17867 - DNA, 20 bp, synthetic construct
  misc_feature 1..20: note = Description of Artificial Sequence: Synthetic oligonucleotide
  misc_feature 1..20: note = Target: ANGPTL4; (+) strand; PAM type: YTN; PAM sequence: CTT
  source 1..20: mol_type = other DNA
ggcagccagatgagggagtg

SEQ ID NO: 17868 - DNA, 20 bp, synthetic construct
  misc_feature 1..20: note = Description of Artificial Sequence: Synthetic oligonucleotide
  misc_feature 1..20: note = Target: ANGPTL4; (+) strand; PAM type: YTN; PAM sequence: TTG
  source 1..20: mol_type = other DNA
gcagccagatgagggagtgg

SEQ ID NO: 17869 - DNA, 20 bp, synthetic construct
  misc_feature 1..20: note = Description of Artificial Sequence: Synthetic oligonucleotide
  misc_feature 1..20: note = Target: ANGPTL4; (+) strand; PAM type: YTN; PAM sequence: CTG
  source 1..20: mol_type = other DNA
tgaagagggacttcctggtg

SEQ ID NO: 17870 - DNA, 20 bp, synthetic construct
  misc_feature 1..20: note = Description of Artificial Sequence: Synthetic oligonucleotide
  misc_feature 1..20: note = Target: ANGPTL4; (+) strand; PAM type: YTN; PAM sequence: CTT
  source 1..20: mol_type = other DNA
cctggtgaccttgtaccttt

SEQ ID NO: 17871 - DNA, 20 bp, synthetic construct
  misc_feature 1..20: note = Description of Artificial Sequence: Synthetic oligonucleotide
  misc_feature 1..20: note = Target: ANGPTL4; (+) strand; PAM type: YTN; PAM sequence: TTC
  source 1..20: mol_type = other DNA
ctggtgaccttgtacctttc

SEQ ID NO: 17872 - DNA, 20 bp, synthetic construct
  misc_feature 1..20: note = Description of Artificial Sequence: Synthetic oligonucleotide
  misc_feature 1..20: note = Target: ANGPTL4; (+) strand; PAM type: YTN; PAM sequence: CTG
  source 1..20: mol_type = other DNA
gtgaccttgtacctttctgg

SEQ ID NO: 17873 - DNA, 20 bp, synthetic construct
  misc_feature 1..20: note = Description of Artificial Sequence: Synthetic oligonucleotide
  misc_feature 1..20: note = Target: ANGPTL4; (+) strand; PAM type: YTN; PAM sequence: CTT
  source 1..20: mol_type = other DNA
gtacctttctgggcagatgg

SEQ ID NO: 17874 - DNA, 20 bp, synthetic construct
  misc_feature 1..20: note = Description of Artificial Sequence: Synthetic oligonucleotide
  misc_feature 1..20: note = Target: ANGPTL4; (+) strand; PAM type: YTN; PAM sequence: TTG
  source 1..20: mol_type = other DNA
tacctttctgggcagatgga

SEQ ID NO: 17875 - DNA, 20 bp, synthetic construct
  misc_feature 1..20: note = Description of Artificial Sequence: Synthetic oligonucleotide
  misc_feature 1..20: note = Target: ANGPTL4; (+) strand; PAM type: YTN; PAM sequence: CTT
  source 1..20: mol_type = other DNA
tctgggcagatggaggctgg

SEQ ID NO: 17876 - DNA, 20 bp, synthetic construct
  misc_feature 1..20: note = Description of Artificial Sequence: Synthetic oligonucleotide
  misc_feature 1..20: note = Target: ANGPTL4; (+) strand; PAM type: YTN; PAM sequence: TTT
  source 1..20: mol_type = other DNA
ctgggcagatggaggctgga

SEQ ID NO: 17877 - DNA, 20 bp, synthetic construct
  misc_feature 1..20: note = Description of Artificial Sequence: Synthetic oligonucleotide
  misc_feature 1..20: note = Target: ANGPTL4; (+) strand; PAM type: YTN; PAM sequence: TTC
  source 1..20: mol_type = other DNA
tgggcagatggaggctggac

SEQ ID NO: 17878 - DNA, 20 bp, synthetic construct
  misc_feature 1..20: note = Description of Artificial Sequence: Synthetic oligonucleotide
  misc_feature 1..20: note = Target: ANGPTL4; (+) strand; PAM type: YTN; PAM sequence: CTG
  source 1..20: mol_type = other DNA
ggcagatggaggctggacag

SEQ ID NO: 17879 - DNA, 20 bp, synthetic construct
  misc_feature 1..20: note = Description of Artificial Sequence: Synthetic oligonucleotide
  misc_feature 1..20: note = Target: ANGPTL4; (+) strand; PAM type: YTN; PAM sequence: CTG
  source 1..20: mol_type = other DNA
gacagtaattcagaggcgcc

SEQ ID NO: 17880 - DNA, 20 bp, synthetic construct
  misc_feature 1..20: note = Description of Artificial Sequence: Synthetic oligonucleotide
  misc_feature 1..20: note = Target: ANGPTL4; (+) strand; PAM type: YTN; PAM sequence: TTC
  source 1..20: mol_type = other DNA
agaggcgccacgatggctca

SEQ ID NO: 17881 - DNA, 20 bp, synthetic construct
  misc_feature 1..20: note = Description of Artificial Sequence: Synthetic oligonucleotide
  misc_feature 1..20: note = Target: ANGPTL4; (+) strand; PAM type: YTN; PAM sequence: CTC
  source 1..20: mol_type = other DNA
agtggacttcaaccggccct

SEQ ID NO: 17882 - DNA, 20 bp, synthetic construct
  misc_feature 1..20: note = Description of Artificial Sequence: Synthetic oligonucleotide
  misc_feature 1..20: note = Target: ANGPTL4; (+) strand; PAM type: YTN; PAM sequence: CTT
  source 1..20: mol_type = other DNA
caaccggccctgggaagcct

SEQ ID NO: 17883 - DNA, 20 bp, synthetic construct
  misc_feature 1..20: note = Description of Artificial Sequence: Synthetic oligonucleotide
  misc_feature 1..20: note = Target: ANGPTL4; (+) strand; PAM type: YTN; PAM sequence: TTC
  source 1..20: mol_type = other DNA
aaccggccctgggaagccta

SEQ ID NO: 17884 - DNA, 20 bp, synthetic construct
  misc_feature 1..20: note = Description of Artificial Sequence: Synthetic oligonucleotide
  misc_feature 1..20: note = Target: ANGPTL4; (+) strand; PAM type: YTN; PAM sequence: CTG
  source 1..20: mol_type = other DNA
ggaagcctacaaggcggggt

SEQ ID NO: 17885 - DNA, 20 bp, synthetic construct
  misc_feature 1..20: note = Description of Artificial Sequence: Synthetic oligonucleotide
  misc_feature 1..20: note = Target: ANGPTL4; (+) strand; PAM type: YTN; PAM sequence: CTA
  source 1..20: mol_type = other DNA
caaggcggggtttggggatc

SEQ ID NO: 17886 - DNA, 20 bp, synthetic construct
  misc_feature 1..20: note = Description of Artificial Sequence: Synthetic oligonucleotide
  misc_feature 1..20: note = Target: ANGPTL4; (+) strand; PAM type: YTN; PAM sequence: TTT
  source 1..20: mol_type = other DNA
ggggatccccacggtaggtg

SEQ ID NO: 17887 - DNA, 20 bp, synthetic construct
  misc_feature 1..20: note = Description of Artificial Sequence: Synthetic oligonucleotide
  misc_feature 1..20: note = Target: ANGPTL4; (+) strand; PAM type: YTN; PAM sequence: TTG
  source 1..20: mol_type = other DNA
gggatccccacggtaggtgt

SEQ ID NO: 17888 - DNA, 20 bp, synthetic construct
  misc_feature 1..20: note = Description of Artificial Sequence: Synthetic oligonucleotide
  misc_feature 1..20: note = Target: ANGPTL4; (+) strand; PAM type: YTN; PAM sequence: TTT
  source 1..20: mol_type = other DNA
ctagtggggacagaggcagg

SEQ ID NO: 17889 - DNA, 20 bp, synthetic construct
  misc_feature 1..20: note = Description of Artificial Sequence: Synthetic oligonucleotide
  misc_feature 1..20: note = Target: ANGPTL4; (+) strand; PAM type: YTN; PAM sequence: TTC
  source 1..20: mol_type = other DNA
tagtggggacagaggcaggg

SEQ ID NO: 17890 - DNA, 20 bp, synthetic construct
  misc_feature 1..20: note = Description of Artificial Sequence: Synthetic oligonucleotide
  misc_feature 1..20: note = Target: ANGPTL4; (+) strand; PAM type: YTN; PAM sequence: CTA
  source 1..20: mol_type = other DNA
gtggggacagaggcagggga

SEQ ID NO: 17891 - DNA, 20 bp, synthetic construct
  misc_feature 1..20: note = Description of Artificial Sequence: Synthetic oligonucleotide
  misc_feature 1..20: note = Target: ANGPTL4; (+) strand; PAM type: YTN; PAM sequence: CTC
  source 1..20: mol_type = other DNA
agaagtggccctgcctcatg

SEQ ID NO: 17892 - DNA, 20 bp, synthetic construct
  misc_feature 1..20: note = Description of Artificial Sequence: Synthetic oligonucleotide
  misc_feature 1..20: note = Target: ANGPTL4; (+) strand; PAM type: YTN; PAM sequence: CTG
  source 1..20: mol_type = other DNA
cctcatggagtggcctctcc

SEQ ID NO: 17893 - DNA, 20 bp, synthetic construct
  misc_feature 1..20: note = Description of Artificial Sequence: Synthetic oligonucleotide
  misc_feature 1..20: note = Target: ANGPTL4; (+) strand; PAM type: YTN; PAM sequence: CTC
  source 1..20: mol_type = other DNA
atggagtggcctctcccact

SEQ ID NO: 17894 - DNA, 20 bp, synthetic construct
  misc_feature 1..20: note = Description of Artificial Sequence: Synthetic oligonucleotide
  misc_feature 1..20: note = Target: ANGPTL4; (+) strand; PAM type: YTN; PAM sequence: CTC
  source 1..20: mol_type = other DNA
tcccactccaggcgagttct

SEQ ID NO: 17895 - DNA, 20 bp, synthetic construct
  misc_feature 1..20: note = Description of Artificial Sequence: Synthetic oligonucleotide
  misc_feature 1..20: note = Target: ANGPTL4; (+) strand; PAM type: YTN; PAM sequence: CTC
  source 1..20: mol_type = other DNA
ccactccaggcgagttctgg

SEQ ID NO: 17896 - DNA, 20 bp, synthetic construct
  misc_feature 1..20: note = Description of Artificial Sequence: Synthetic oligonucleotide
  misc_feature 1..20: note = Target: ANGPTL4; (+) strand; PAM type: YTN; PAM sequence: CTC
  source 1..20: mol_type = other DNA
caggcgagttctggctgggt

SEQ ID NO: 17897 - DNA, 20 bp, synthetic construct
  misc_feature 1..20: note = Description of Artificial Sequence: Synthetic oligonucleotide
  misc_feature 1..20: note = Target: ANGPTL4; (+) strand; PAM type: YTN; PAM sequence: TTC
  source 1..20: mol_type = other DNA
tggctgggtctggagaaggt

SEQ ID NO: 17898 - DNA, 20 bp, synthetic construct
  misc_feature 1..20: note = Description of Artificial Sequence: Synthetic oligonucleotide
  misc_feature 1..20: note = Target: ANGPTL4; (+) strand; PAM type: YTN; PAM sequence: CTG
  source 1..20: mol_type = other DNA
gctgggtctggagaaggtgc

SEQ ID NO: 17899 - DNA, 20 bp, synthetic construct
  misc_feature 1..20: note = Description of Artificial Sequence: Synthetic oligonucleotide
  misc_feature 1..20: note = Target: ANGPTL4; (+) strand; PAM type: YTN; PAM sequence: CTG
  source 1..20: mol_type = other DNA
ggtctggagaaggtgcatag

SEQ ID NO: 17900 - DNA, 20 bp, synthetic construct
  misc_feature 1..20: note = Description of Artificial Sequence: Synthetic oligonucleotide
  misc_feature 1..20: note = Target: ANGPTL4; (+) strand; PAM type: YTN; PAM sequence: CTG
  source 1..20: mol_type = other DNA
gagaaggtgcatagcatcac

SEQ ID NO: 17901 - DNA, 20 bp, synthetic construct
  misc_feature 1..20: note = Description of Artificial Sequence: Synthetic oligonucleotide
  misc_feature 1..20: note = Target: ANGPTL4; (+) strand; PAM type: YTN; PAM sequence: CTG
  source 1..20: mol_type = other DNA
gccgtgcagctgcgggactg

SEQ ID NO: 17902 - DNA, 20 bp, synthetic construct
  misc_feature 1..20: note = Description of Artificial Sequence: Synthetic oligonucleotide
  misc_feature 1..20: note = Target: ANGPTL4; (+) strand; PAM type: YTN; PAM sequence: CTG
  source 1..20: mol_type = other DNA
cgggactgggatggcaacgc

SEQ ID NO: 17903 - DNA, 20 bp, synthetic construct
  misc_feature 1..20: note = Description of Artificial Sequence: Synthetic oligonucleotide
  misc_feature 1..20: note = Target: ANGPTL4; (+) strand; PAM type: YTN; PAM sequence: CTG
  source 1..20: mol_type = other DNA
ggatggcaacgccgagttgc

SEQ ID NO: 17904 - DNA, 20 bp, synthetic construct
  misc_feature 1..20: note = Description of Artificial Sequence: Synthetic oligonucleotide
  misc_feature 1..20: note = Target: ANGPTL4; (+) strand; PAM type: YTN; PAM sequence: TTG
  source 1..20: mol_type = other DNA
ctgcagttctccgtgcacct

SEQ ID NO: 17905 - DNA, 20 bp, synthetic construct
  misc_feature 1..20: note = Description of Artificial Sequence: Synthetic oligonucleotide
  misc_feature 1..20: note = Target: ANGPTL4; (+) strand; PAM type: YTN; PAM sequence: CTG
  source 1..20: mol_type = other DNA
cagttctccgtgcacctggg

SEQ ID NO: 17906 - DNA, 20 bp, synthetic construct
  misc_feature 1..20: note = Description of Artificial Sequence: Synthetic oligonucleotide
  misc_feature 1..20: note = Target: ANGPTL4; (+) strand; PAM type: YTN; PAM sequence: TTC
  source 1..20: mol_type = other DNA
tccgtgcacctgggtggcga

SEQ ID NO: 17907 - DNA, 20 bp, synthetic construct
  misc_feature 1..20: note = Description of Artificial Sequence: Synthetic oligonucleotide
  misc_feature 1..20: note = Target: ANGPTL4; (+) strand; PAM type: YTN; PAM sequence: CTC
  source 1..20: mol_type = other DNA
cgtgcacctgggtggcgagg

SEQ ID NO: 17908 - DNA, 20 bp, synthetic construct
  misc_feature 1..20: note = Description of Artificial Sequence: Synthetic oligonucleotide
  misc_feature 1..20: note = Target: ANGPTL4; (+) strand; PAM type: YTN; PAM sequence: CTG
  source 1..20: mol_type = other DNA
ggtggcgaggacacggccta

SEQ ID NO: 17909 - DNA, 20 bp, synthetic construct
  misc_feature 1..20: note = Description of Artificial Sequence: Synthetic oligonucleotide
  misc_feature 1..20: note = Target: ANGPTL4; (+) strand; PAM type: YTN; PAM sequence: CTA
  source 1..20: mol_type = other DNA
tagcctgcagctcactgcac

SEQ ID NO: 17910 - DNA, 20 bp, synthetic construct
  misc_feature 1..20: note = Description of Artificial Sequence: Synthetic oligonucleotide
  misc_feature 1..20: note = Target: ANGPTL4; (+) strand; PAM type: YTN; PAM sequence: CTG
  source 1..20: mol_type = other DNA
cagctcactgcacccgtggc

SEQ ID NO: 17911 - DNA, 20 bp, synthetic construct
  misc_feature 1..20: note = Description of Artificial Sequence: Synthetic oligonucleotide
  misc_feature 1..20: note = Target: ANGPTL4; (+) strand; PAM type: YTN; PAM sequence: CTC
  source 1..20: mol_type = other DNA
actgcacccgtggccggcca

SEQ ID NO: 17912 - DNA, 20 bp, synthetic construct
  misc_feature 1..20: note = Description of Artificial Sequence: Synthetic oligonucleotide
  misc_feature 1..20: note = Target: ANGPTL4; (+) strand; PAM type: YTN; PAM sequence: CTG
  source 1..20: mol_type = other DNA
cacccgtggccggccagctg

SEQ ID NO: 17913 - DNA, 20 bp, synthetic construct
  misc_feature 1..20: note = Description of Artificial Sequence: Synthetic oligonucleotide
  misc_feature 1..20: note = Target: ANGPTL4; (+) strand; PAM type: YTN; PAM sequence: CTG
  source 1..20: mol_type = other DNA
ggcgccaccaccgtcccacc

SEQ ID NO: 17914 - DNA, 20 bp, synthetic construct
  misc_feature 1..20: note = Description of Artificial Sequence: Synthetic oligonucleotide
  misc_feature 1..20: note = Target: ANGPTL4; (+) strand; PAM type: YTN; PAM sequence: CTC
  source 1..20: mol_type = other DNA
tccgtacccttctccacttg

SEQ ID NO: 17915 - DNA, 20 bp, synthetic construct
  misc_feature 1..20: note = Description of Artificial Sequence: Synthetic oligonucleotide
  misc_feature 1..20: note = Target: ANGPTL4; (+) strand; PAM type: YTN; PAM sequence: CTC
  source 1..20: mol_type = other DNA
cgtacccttctccacttggg

SEQ ID NO: 17916 - DNA, 20 bp, synthetic construct
  misc_feature 1..20: note = Description of Artificial Sequence: Synthetic oligonucleotide
  misc_feature 1..20: note = Target: ANGPTL4; (+) strand; PAM type: YTN; PAM sequence: CTT
  source 1..20: mol_type = other DNA
ctccacttgggaccaggatc

SEQ ID NO: 17917 - DNA, 20 bp, synthetic construct
  misc_feature 1..20: note = Description of Artificial Sequence: Synthetic oligonucleotide
  misc_feature 1..20: note = Target: ANGPTL4; (+) strand; PAM type: YTN; PAM sequence: TTC
  source 1..20: mol_type = other DNA
tccacttgggaccaggatca

SEQ ID NO: 17918 - DNA, 20 bp, synthetic construct
  misc_feature 1..20: note = Description of Artificial Sequence: Synthetic oligonucleotide
  misc_feature 1..20: note = Target: ANGPTL4; (+) strand; PAM type: YTN; PAM sequence: CTC
  source 1..20: mol_type = other DNA
cacttgggaccaggatcacg

SEQ ID NO: 17919 - DNA, 20 bp, synthetic construct
  misc_feature 1..20: note = Description of Artificial Sequence: Synthetic oligonucleotide
  misc_feature 1..20: note = Target: ANGPTL4; (+) strand; PAM type: YTN; PAM sequence: CTT
  source 1..20: mol_type = other DNA
gggaccaggatcacgacctc

SEQ ID NO: 17920 - DNA, 20 bp, synthetic construct
  misc_feature 1..20: note = Description of Artificial Sequence: Synthetic oligonucleotide
  misc_feature 1..20: note = Target: ANGPTL4; (+) strand; PAM type: YTN; PAM sequence: TTG
  source 1..20: mol_type = other DNA
ggaccaggatcacgacctcc

SEQ ID NO: 17921 - DNA, 20 bp, synthetic construct
  misc_feature 1..20: note = Description of Artificial Sequence: Synthetic oligonucleotide
  misc_feature 1..20: note = Target: ANGPTL4; (+) strand; PAM type: YTN; PAM sequence: CTC
  source 1..20: mol_type = other DNA
cgcagggacaagaactgcgc

SEQ ID NO: 17922 - DNA, 20 bp, synthetic construct
  misc_feature 1..20: note = Description of Artificial Sequence: Synthetic oligonucleotide
  misc_feature 1..20: note = Target: ANGPTL4; (+) strand; PAM type: YTN; PAM sequence: CTG
  source 1..20: mol_type = other DNA
cgccaagagcctctctggtg

SEQ ID NO: 17923 - DNA, 20 bp, synthetic construct
  misc_feature 1..20: note = Description of Artificial Sequence: Synthetic oligonucleotide
  misc_feature 1..20: note = Target: ANGPTL4; (+) strand; PAM type: YTN; PAM sequence: CTC
  source 1..20: mol_type = other DNA
tctggtgagcaggccctgcc

SEQ ID NO: 17924 - DNA, 20 bp, synthetic construct
  misc_feature 1..20: note = Description of Artificial Sequence: Synthetic oligonucleotide
  misc_feature 1..20: note = Target: ANGPTL4; (+) strand; PAM type: YTN; PAM sequence: CTC
  source 1..20: mol_type = other DNA
tggtgagcaggccctgccat

SEQ ID NO: 17925 - DNA, 20 bp, synthetic construct
  misc_feature 1..20: note = Description of Artificial Sequence: Synthetic oligonucleotide
  misc_feature 1..20: note = Target: ANGPTL4; (+) strand; PAM type: YTN; PAM sequence: CTG
  source 1..20: mol_type = other DNA
gtgagcaggccctgccatgc

SEQ ID NO: 17926 - DNA, 20 bp, synthetic construct
  misc_feature 1..20: note = Description of Artificial Sequence: Synthetic oligonucleotide
  misc_feature 1..20: note = Target: ANGPTL4; (+) strand; PAM type: YTN; PAM sequence: CTG
  source 1..20: mol_type = other DNA
ccatgccacacccagccagc

SEQ ID NO: 17927 - DNA, 20 bp, synthetic construct
  misc_feature 1..20: note = Description of Artificial Sequence: Synthetic oligonucleotide
  misc_feature 1..20: note = Target: ANGPTL4; (+) strand; PAM type: YTN; PAM sequence: CTT
  source 1..20: mol_type = other DNA
ccctccttatctttctgctg

SEQ ID NO: 17928 - DNA, 20 bp, synthetic construct
  misc_feature 1..20: note = Description of Artificial Sequence: Synthetic oligonucleotide
  misc_feature 1..20: note = Target: ANGPTL4; (+) strand; PAM type: YTN; PAM sequence: TTC
  source 1..20: mol_type = other DNA
cctccttatctttctgctgc

SEQ ID NO: 17929 - DNA, 20 bp, synthetic construct
  misc_feature 1..20: note = Description of Artificial Sequence: Synthetic oligonucleotide
  misc_feature 1..20: note = Target: ANGPTL4; (+) strand; PAM type: YTN; PAM sequence: CTC
  source 1..20: mol_type = other DNA
cttatctttctgctgctctg

SEQ ID NO: 17930 - DNA, 20 bp, synthetic construct
  misc_feature 1..20: note = Description of Artificial Sequence: Synthetic oligonucleotide
  misc_feature 1..20: note = Target: ANGPTL4; (+) strand; PAM type: YTN; PAM sequence: CTT
  source 1..20: mol_type = other DNA
atctttctgctgctctgtcc

SEQ ID NO: 17931 - DNA, 20 bp, synthetic construct
  misc_feature 1..20: note = Description of Artificial Sequence: Synthetic oligonucleotide
  misc_feature 1..20: note = Target: ANGPTL4; (+) strand; PAM type: YTN; PAM sequence: TTA
  source 1..20: mol_type = other DNA
tctttctgctgctctgtcct

SEQ ID NO: 17932 - DNA, 20 bp, synthetic construct
  misc_feature 1..20: note = Description of Artificial Sequence: Synthetic oligonucleotide
  misc_feature 1..20: note = Target: ANGPTL4; (+) strand; PAM type: YTN; PAM sequence: CTT
  source 1..20: mol_type = other DNA
tctgctgctctgtcctgcct

SEQ ID NO: 17933 - DNA, 20 bp, synthetic construct
  misc_feature 1..20: note = Description of Artificial Sequence: Synthetic oligonucleotide
  misc_feature 1..20: note = Target: ANGPTL4; (+) strand; PAM type: YTN; PAM sequence: TTT
  source 1..20: mol_type = other DNA
ctgctgctctgtcctgcctt

SEQ ID NO: 17934 - DNA, 20 bp, synthetic construct
  misc_feature 1..20: note = Description of Artificial Sequence: Synthetic oligonucleotide
  misc_feature 1..20: note = Target: ANGPTL4; (+) strand; PAM type: YTN; PAM sequence: TTC
  source 1..20: mol_type = other DNA
tgctgctctgtcctgccttc

SEQ ID NO: 17935 - DNA, 20 bp, synthetic construct
  misc_feature 1..20: note = Description of Artificial Sequence: Synthetic oligonucleotide
  misc_feature 1..20: note = Target: ANGPTL4; (+) strand; PAM type: YTN; PAM sequence: CTG
  source 1..20: mol_type = other DNA
ctgctctgtcctgccttcaa

SEQ ID NO: 17936 - DNA, 20 bp, synthetic construct
  misc_feature 1..20: note = Description of Artificial Sequence: Synthetic oligonucleotide
  misc_feature 1..20: note = Target: ANGPTL4; (+) strand; PAM type: YTN; PAM sequence: CTG
  source 1..20: mol_type = other DNA
ctctgtcctgccttcaaccc

SEQ ID NO: 17937 - DNA, 20 bp, synthetic construct
  misc_feature 1..20: note = Description of Artificial Sequence: Synthetic oligonucleotide
  misc_feature 1..20: note = Target: ANGPTL4; (+) strand; PAM type: YTN; PAM sequence: CTC
  source 1..20: mol_type = other DNA
tgtcctgccttcaaccccac

SEQ ID NO: 17938 - DNA, 20 bp, synthetic construct
  misc_feature 1..20: note = Description of Artificial Sequence: Synthetic oligonucleotide
  misc_feature 1..20: note = Target: ANGPTL4; (+) strand; PAM type: YTN; PAM sequence: CTG
  source 1..20: mol_type = other DNA
tcctgccttcaaccccacat

SEQ ID NO: 17939 - DNA, 20 bp, synthetic construct
  misc_feature 1..20: note = Description of Artificial Sequence: Synthetic oligonucleotide
  misc_feature 1..20: note = Target: ANGPTL4; (+) strand; PAM type: YTN; PAM sequence: CTG
  source 1..20: mol_type = other DNA
ccttcaaccccacattgcat

SEQ ID NO: 17940 - DNA, 20 bp, synthetic construct
  misc_feature 1..20: note = Description of Artificial Sequence: Synthetic oligonucleotide
  misc_feature 1..20: note = Target: ANGPTL4; (+) strand; PAM type: YTN; PAM sequence: CTT
  source 1..20: mol_type = other DNA
caaccccacattgcatctgt

SEQ ID NO: 17941 - DNA, 20 bp, synthetic construct
  misc_feature 1..20: note = Description of Artificial Sequence: Synthetic oligonucleotide
  misc_feature 1..20: note = Target: ANGPTL4; (+) strand; PAM type: YTN; PAM sequence: TTC
  source 1..20: mol_type = other DNA
aaccccacattgcatctgtt

SEQ ID NO: 17942 - DNA, 20 bp, synthetic construct
  misc_feature 1..20: note = Description of Artificial Sequence: Synthetic oligonucleotide
  misc_feature 1..20: note = Target: ANGPTL4; (+) strand; PAM type: YTN; PAM sequence: TTG
  source 1..20: mol_type = other DNA
catctgtttcctgcccccac

SEQ ID NO: 17943 - DNA, 20 bp, synthetic construct
  misc_feature 1..20: note = Description of Artificial Sequence: Synthetic oligonucleotide
  misc_feature 1..20: note = Target: ANGPTL4; (+) strand; PAM type: YTN; PAM sequence: CTG
  source 1..20: mol_type = other DNA
tttcctgcccccacctcttc

SEQ ID NO: 17944 - DNA, 20 bp, synthetic construct
  misc_feature 1..20: note = Description of Artificial Sequence: Synthetic oligonucleotide
  misc_feature 1..20: note = Target: ANGPTL4; (+) strand; PAM type: YTN; PAM sequence: TTT
  source 1..20: mol_type = other DNA
cctgcccccacctcttcctt

SEQ ID NO: 17945 - DNA, 20 bp, synthetic construct
  misc_feature 1..20: note = Description of Artificial Sequence: Synthetic oligonucleotide
  misc_feature 1..20: note = Target: ANGPTL4; (+) strand; PAM type: YTN; PAM sequence: TTC
  source 1..20: mol_type = other DNA
ctgcccccacctcttcctta

SEQ ID NO: 17946 - DNA, 20 bp, synthetic construct
  misc_feature 1..20: note = Description of Artificial Sequence: Synthetic oligonucleotide
  misc_feature 1..20: note = Target: ANGPTL4; (+) strand; PAM type: YTN; PAM sequence: CTG
  source 1..20: mol_type = other DNA
cccccacctcttccttacat

SEQ ID NO: 17947 - DNA, 20 bp, synthetic construct
  misc_feature 1..20: note = Description of Artificial Sequence: Synthetic oligonucleotide
  misc_feature 1..20: note = Target: ANGPTL4; (+) strand; PAM type: YTN; PAM sequence: CTC
  source 1..20: mol_type = other DNA
ttccttacatgccgtgtgtg

SEQ ID NO: 17948 - DNA, 20 bp, synthetic construct
  misc_feature 1..20: note = Description of Artificial Sequence: Synthetic oligonucleotide
  misc_feature 1..20: note = Target: ANGPTL4; (+) strand; PAM type: YTN; PAM sequence: CTT
  source 1..20: mol_type = other DNA
ccttacatgccgtgtgtgtg

SEQ ID NO: 17949 - DNA, 20 bp, synthetic construct
  misc_feature 1..20: note = Description of Artificial Sequence: Synthetic oligonucleotide
  misc_feature 1..20: note = Target: ANGPTL4; (+) strand; PAM type: YTN; PAM sequence: TTC
  source 1..20: mol_type = other DNA
cttacatgccgtgtgtgtga

SEQ ID NO: 17950 - DNA, 20 bp, synthetic construct
  misc_feature 1..20: note = Description of Artificial Sequence: Synthetic oligonucleotide
  misc_feature 1..20: note = Target: ANGPTL4; (+) strand; PAM type: YTN; PAM sequence: CTT
  source 1..20: mol_type = other DNA
acatgccgtgtgtgtgattg

SEQ ID NO: 17951 - DNA, 20 bp, synthetic construct
  misc_feature 1..20: note = Description of Artificial Sequence: Synthetic oligonucleotide
  misc_feature 1..20: note = Target: ANGPTL4; (+) strand; PAM type: YTN; PAM sequence: TTA
  source 1..20: mol_type = other DNA
catgccgtgtgtgtgattgg

SEQ ID NO: 17952 - DNA, 20 bp, synthetic construct
  misc_feature 1..20: note = Description of Artificial Sequence: Synthetic oligonucleotide
  misc_feature 1..20: note = Target: ANGPTL4; (+) strand; PAM type: YTN; PAM sequence: TTG
  source 1..20: mol_type = other DNA
ggccactaacttagcctatc

SEQ ID NO: 17953 - DNA, 20 bp, synthetic construct
  misc_feature 1..20: note = Description of Artificial Sequence: Synthetic oligonucleotide
  misc_feature 1..20: note = Target: ANGPTL4; (+) strand; PAM type: YTN; PAM sequence: CTA
  source 1..20: mol_type = other DNA
acttagcctatctggcctca

SEQ ID NO: 17954 - DNA, 20 bp, synthetic construct
  misc_feature 1..20: note = Description of Artificial Sequence: Synthetic oligonucleotide
  misc_feature 1..20: note = Target: ANGPTL4; (+) strand; PAM type: YTN; PAM sequence: CTT
  source 1..20: mol_type = other DNA
agcctatctggcctcagttt

SEQ ID NO: 17955 - DNA, 20 bp, synthetic construct
  misc_feature 1..20: note = Description of Artificial Sequence: Synthetic oligonucleotide
  misc_feature 1..20: note = Target: ANGPTL4; (+) strand; PAM type: YTN; PAM sequence: TTA
  source 1..20: mol_type = other DNA
gcctatctggcctcagtttt

SEQ ID NO: 17956 - DNA, 20 bp, synthetic construct
  misc_feature 1..20: note = Description of Artificial Sequence: Synthetic oligonucleotide
  misc_feature 1..20: note = Target: ANGPTL4; (+) strand; PAM type: YTN; PAM sequence: CTA
  source 1..20: mol_type = other DNA
tctggcctcagttttcccat

SEQ ID NO: 17957 - DNA, 20 bp, synthetic construct
  misc_feature 1..20: note = Description of Artificial Sequence: Synthetic oligonucleotide
  misc_feature 1..20: note = Target: ANGPTL4; (+) strand; PAM type: YTN; PAM sequence: CTG
  source 1..20: mol_type = other DNA
gcctcagttttcccatcctg

SEQ ID NO: 17958 - DNA, 20 bp, synthetic construct
  misc_feature 1..20: note = Description of Artificial Sequence: Synthetic oligonucleotide
  misc_feature 1..20: note = Target: ANGPTL4; (+) strand; PAM type: YTN; PAM sequence: CTC
  source 1..20: mol_type = other DNA
agttttcccatcctgaaaag

SEQ ID NO: 17959 - DNA, 20 bp, synthetic construct
  misc_feature 1..20: note = Description of Artificial Sequence: Synthetic oligonucleotide
  misc_feature 1..20: note = Target: ANGPTL4; (+) strand; PAM type: YTN; PAM sequence: TTT
  source 1..20: mol_type = other DNA
tcccatcctgaaaagggtct

SEQ ID NO: 17960 - DNA, 20 bp, synthetic construct
  misc_feature 1..20: note = Description of Artificial Sequence: Synthetic oligonucleotide
  misc_feature 1..20: note = Target: ANGPTL4; (+) strand; PAM type: YTN; PAM sequence: TTT
  source 1..20: mol_type = other DNA
cccatcctgaaaagggtctt

SEQ ID NO: 17961 - DNA, 20 bp, synthetic construct
  misc_feature 1..20: note = Description of Artificial Sequence: Synthetic oligonucleotide
  misc_feature 1..20: note = Target: ANGPTL4; (+) strand; PAM type: YTN; PAM sequence: TTC
  source 1..20: mol_type = other DNA
ccatcctgaaaagggtcttg

SEQ ID NO: 17962 - DNA, 20 bp, synthetic construct
  misc_feature 1..20: note = Description of Artificial Sequence: Synthetic oligonucleotide
  misc_feature 1..20: note = Target: ANGPTL4; (+) strand; PAM type: YTN; PAM sequence: CTG
  source 1..20: mol_type = other DNA
aaaagggtcttgaccgtctt

SEQ ID NO: 17963 - DNA, 20 bp, synthetic construct
  misc_feature 1..20: note = Description of Artificial Sequence: Synthetic oligonucleotide
  misc_feature 1..20: note = Target: ANGPTL4; (+) strand; PAM type: YTN; PAM sequence: CTT
  source 1..20: mol_type = other DNA
gaccgtctttacttttattt

SEQ ID NO: 17964 - DNA, 20 bp, synthetic construct
  misc_feature 1..20: note = Description of Artificial Sequence: Synthetic oligonucleotide
  misc_feature 1..20: note = Target: ANGPTL4; (+) strand; PAM type: YTN; PAM sequence: TTG
  source 1..20: mol_type = other DNA
accgtctttacttttattta

SEQ ID NO: 17965 - DNA, 20 bp, synthetic construct
  misc_feature 1..20: note = Description of Artificial Sequence: Synthetic oligonucleotide
  misc_feature 1..20: note = Target: ANGPTL4; (+) strand; PAM type: YTN; PAM sequence: CTT
  source 1..20: mol_type = other DNA
tacttttatttacttatgtg

SEQ ID NO: 17966 - DNA, 20 bp, synthetic construct
  misc_feature 1..20: note = Description of Artificial Sequence: Synthetic oligonucleotide
  misc_feature 1..20: note = Target: ANGPTL4; (+) strand; PAM type: YTN; PAM sequence: TTT
  source 1..20: mol_type = other DNA
acttttatttacttatgtgt

SEQ ID NO: 17967 - DNA, 20 bp, synthetic construct
  misc_feature 1..20: note = Description of Artificial Sequence: Synthetic oligonucleotide
  misc_feature 1..20: note = Target: ANGPTL4; (+) strand; PAM type: YTN; PAM sequence: TTA
  source 1..20: mol_type = other DNA
cttttatttacttatgtgtt

SEQ ID NO: 17968 - DNA, 20 bp, synthetic construct
  misc_feature 1..20: note = Description of Artificial Sequence: Synthetic oligonucleotide
  misc_feature 1..20: note = Target: ANGPTL4; (+) strand; PAM type: YTN; PAM sequence: CTT
  source 1..20: mol_type = other DNA
ttatttacttatgtgtttgt

SEQ ID NO: 17969 - DNA, 20 bp, synthetic construct
  misc_feature 1..20: note = Description of Artificial Sequence: Synthetic oligonucleotide
  misc_feature 1..20: note = Target: ANGPTL4; (+) strand; PAM type: YTN; PAM sequence: TTT
  source 1..20: mol_type = other DNA
tatttacttatgtgtttgtt

SEQ ID NO: 17970 - DNA, 20 bp, synthetic construct
  misc_feature 1..20: note = Description of Artificial Sequence: Synthetic oligonucleotide
  misc_feature 1..20: note = Target: ANGPTL4; (+) strand; PAM type: YTN; PAM sequence: TTT
  source 1..20: mol_type = other DNA
atttacttatgtgtttgttt

SEQ ID NO: 17971 - DNA, 20 bp, synthetic construct
  misc_feature 1..20: note = Description of Artificial Sequence: Synthetic oligonucleotide
  misc_feature 1..20: note = Target: ANGPTL4; (+) strand; PAM type: YTN; PAM sequence: TTA
  source 1..20: mol_type = other DNA
tttacttatgtgtttgttta

SEQ ID NO: 17972 - DNA, 20 bp, synthetic construct
  misc_feature 1..20: note = Description of Artificial Sequence: Synthetic oligonucleotide
  misc_feature 1..20: note = Target: ANGPTL4; (+) strand; PAM type: YTN; PAM sequence: TTT
  source 1..20: mol_type = other DNA
acttatgtgtttgtttattt

SEQ ID NO: 17973 - DNA, 20 bp, synthetic construct
  misc_feature 1..20: note = Description of Artificial Sequence: Synthetic oligonucleotide
  misc_feature 1..20: note = Target: ANGPTL4; (+) strand; PAM type: YTN; PAM sequence: TTA
  source 1..20: mol_type = other DNA
cttatgtgtttgtttattta

SEQ ID NO: 17974 - DNA, 20 bp, synthetic construct
  misc_feature 1..20: note = Description of Artificial Sequence: Synthetic oligonucleotide
  misc_feature 1..20: note = Target: ANGPTL4; (+) strand; PAM type: YTN; PAM sequence: CTT
  source 1..20: mol_type = other DNA
atgtgtttgtttatttattt

SEQ ID NO: 17975 - DNA, 20 bp, synthetic construct
  misc_feature 1..20: note = Description of Artificial Sequence: Synthetic oligonucleotide
  misc_feature 1..20: note = Target: ANGPTL4; (+) strand; PAM type: YTN; PAM sequence: TTA
  source 1..20: mol_type = other DNA
tgtgtttgtttatttattta

SEQ ID NO: 17976 - DNA, 20 bp, synthetic construct
  misc_feature 1..20: note = Description of Artificial Sequence: Synthetic oligonucleotide
  misc_feature 1..20: note = Target: ANGPTL4; (+) strand; PAM type: YTN; PAM sequence: TTT
  source 1..20: mol_type = other DNA
gtttatttatttatttatgt

SEQ ID NO: 17977 - DNA, 20 bp, synthetic construct
  misc_feature 1..20: note = Description of Artificial Sequence: Synthetic oligonucleotide
  misc_feature 1..20: note = Target: ANGPTL4; (+) strand; PAM type: YTN; PAM sequence: TTG
  source 1..20: mol_type = other DNA
tttatttatttatttatgta

SEQ ID NO: 17978 - DNA, 20 bp, synthetic construct
  misc_feature 1..20: note = Description of Artificial Sequence: Synthetic oligonucleotide
  misc_feature 1..20: note = Target: ANGPTL4; (+) strand; PAM type: YTN; PAM sequence: TTT
  source 1..20: mol_type = other DNA
atttatttatttatgtattt

SEQ ID NO: 17979 - DNA, 20 bp, synthetic construct
  misc_feature 1..20: note = Description of Artificial Sequence: Synthetic oligonucleotide
  misc_feature 1..20: note = Target: ANGPTL4; (+) strand; PAM type: YTN; PAM sequence: TTA
  source 1..20: mol_type = other DNA
tttatttatttatgtattta

SEQ ID NO: 17980 - DNA, 20 bp, synthetic construct
  misc_feature 1..20: note = Description of Artificial Sequence: Synthetic oligonucleotide
  misc_feature 1..20: note = Target: ANGPTL4; (+) strand; PAM type: YTN; PAM sequence: TTT
  source 1..20: mol_type = other DNA
atttatttatgtatttattt

SEQ ID NO: 17981 - DNA, 20 bp, synthetic construct
  misc_feature 1..20: note = Description of Artificial Sequence: Synthetic oligonucleotide
  misc_feature 1..20: note = Target: ANGPTL4; (+) strand; PAM type: YTN; PAM sequence: TTA
  source 1..20: mol_type = other DNA
tttatttatgtatttatttt

SEQ ID NO: 17982 - DNA, 20 bp, synthetic construct
  misc_feature 1..20: note = Description of Artificial Sequence: Synthetic oligonucleotide
  misc_feature 1..20: note = Target: ANGPTL4; (+) strand; PAM type: YTN; PAM sequence: TTT
  source 1..20: mol_type = other DNA
atttatgtatttattttttg

SEQ ID NO: 17983 - DNA, 20 bp, synthetic construct
  misc_feature 1..20: note = Description of Artificial Sequence: Synthetic oligonucleotide
  misc_feature 1..20: note = Target: ANGPTL4; (+) strand; PAM type: YTN; PAM sequence: TTA
  source 1..20: mol_type = other DNA
tttatgtatttattttttga

SEQ ID NO: 17984 - DNA, 20 bp, synthetic construct
  misc_feature 1..20: note = Description of Artificial Sequence: Synthetic oligonucleotide
  misc_feature 1..20: note = Target: ANGPTL4; (+) strand; PAM type: YTN; PAM sequence: TTT
  source 1..20: mol_type = other DNA
atgtatttattttttgagac

SEQ ID NO: 17985 - DNA, 20 bp, synthetic construct
  misc_feature 1..20: note = Description of Artificial Sequence: Synthetic oligonucleotide
  misc_feature 1..20: note = Target: ANGPTL4; (+) strand; PAM type: YTN; PAM sequence: TTA
  source 1..20: mol_type = other DNA
tgtatttattttttgagacg

SEQ ID NO: 17986 - DNA, 20 bp, synthetic construct
  misc_feature 1..20: note = Description of Artificial Sequence: Synthetic oligonucleotide
  misc_feature 1..20: note = Target: ANGPTL4; (+) strand; PAM type: YTN; PAM sequence: TTT
  source 1..20: mol_type = other DNA
attttttgagacggagtctc

SEQ ID NO: 17987 - DNA, 20 bp, synthetic construct
  misc_feature 1..20: note = Description of Artificial Sequence: Synthetic oligonucleotide
  misc_feature 1..20: note = Target: ANGPTL4; (+) strand; PAM type: YTN; PAM sequence: TTA
  source 1..20: mol_type = other DNA
ttttttgagacggagtctca

SEQ ID NO: 17988 - DNA, 20 bp, synthetic construct
  misc_feature 1..20: note = Description of Artificial Sequence: Synthetic oligonucleotide
  misc_feature 1..20: note = Target: ANGPTL4; (+) strand; PAM type: YTN; PAM sequence: TTT
  source 1..20: mol_type = other DNA
tttgagacggagtctcactt

SEQ ID NO: 17989 - DNA, 20 bp, synthetic construct
  misc_feature 1..20: note = Description of Artificial Sequence: Synthetic oligonucleotide
  misc_feature 1..20: note = Target: ANGPTL4; (+) strand; PAM type: YTN; PAM sequence: TTT
  source 1..20: mol_type = other DNA
ttgagacggagtctcacttt

SEQ ID NO: 17990 - DNA, 20 bp, synthetic construct
  misc_feature 1..20: note = Description of Artificial Sequence: Synthetic oligonucleotide
  misc_feature 1..20: note = Target: ANGPTL4; (+) strand; PAM type: YTN; PAM sequence: TTT
  source 1..20: mol_type = other DNA
tgagacggagtctcactttg

SEQ ID NO: 17991 - DNA, 20 bp, synthetic construct
  misc_feature 1..20: note = Description of Artificial Sequence: Synthetic oligonucleotide
  misc_feature 1..20: note = Target: ANGPTL4; (+) strand; PAM type: YTN; PAM sequence: TTT
  source 1..20: mol_type = other DNA
gagacggagtctcactttgt

SEQ ID NO: 17992 - DNA, 20 bp, synthetic construct
  misc_feature 1..20: note = Description of Artificial Sequence: Synthetic oligonucleotide
  misc_feature 1..20: note = Target: ANGPTL4; (+) strand; PAM type: YTN; PAM sequence: TTG
  source 1..20: mol_type = other DNA
agacggagtctcactttgtc

SEQ ID NO: 17993 - DNA, 20 bp, synthetic construct
  misc_feature 1..20: note = Description of Artificial Sequence: Synthetic oligonucleotide
  misc_feature 1..20: note = Target: ANGPTL4; (+) strand; PAM type: YTN; PAM sequence: CTC
  source 1..20: mol_type = other DNA
actttgtcacccaggctgga

SEQ ID NO: 17994 - DNA, 20 bp, synthetic construct
  misc_feature 1..20: note = Description of Artificial Sequence: Synthetic oligonucleotide
  misc_feature 1..20: note = Target: ANGPTL4; (+) strand; PAM type: YTN; PAM sequence: CTT
  source 1..20: mol_type = other DNA
tgtcacccaggctggagtgc

SEQ ID NO: 17995 - DNA, 20 bp, synthetic construct
  misc_feature 1..20: note = Description of Artificial Sequence: Synthetic oligonucleotide
  misc_feature 1..20: note = Target: ANGPTL4; (+) strand; PAM type: YTN; PAM sequence: TTT
  source 1..20: mol_type = other DNA
gtcacccaggctggagtgct

SEQ ID NO: 17996 - DNA, 20 bp, synthetic construct
  misc_feature 1..20: note = Description of Artificial Sequence: Synthetic oligonucleotide
  misc_feature 1..20: note = Target: ANGPTL4; (+) strand; PAM type: YTN; PAM sequence: TTG
  source 1..20: mol_type = other DNA
tcacccaggctggagtgctt

SEQ ID NO: 17997 - DNA, 20 bp, synthetic construct
  misc_feature 1..20: note = Description of Artificial Sequence: Synthetic oligonucleotide
  misc_feature 1..20: note = Target: ANGPTL4; (+) strand; PAM type: YTN; PAM sequence: CTG
  source 1..20: mol_type = other DNA
gagtgctttgtggcacgatc

SEQ ID NO: 17998 - DNA, 20 bp, synthetic construct
  misc_feature 1..20: note = Description of Artificial Sequence: Synthetic oligonucleotide
  misc_feature 1..20: note = Target: ANGPTL4; (+) strand; PAM type: YTN; PAM sequence: CTT
  source 1..20: mol_type = other DNA
tgtggcacgatcttggctca

SEQ ID NO: 17999 - DNA, 20 bp, synthetic construct
  misc_feature 1..20: note = Description of Artificial Sequence: Synthetic oligonucleotide
  misc_feature 1..20: note = Target: ANGPTL4; (+) strand; PAM type: YTN; PAM sequence: TTT
  source 1..20: mol_type = other DNA
gtggcacgatcttggctcac

SEQ ID NO: 18000 - DNA, 20 bp, synthetic construct
  misc_feature 1..20: note = Description of Artificial Sequence: Synthetic oligonucleotide
  misc_feature 1..20: note = Target: ANGPTL4; (+) strand; PAM type: YTN; PAM sequence: TTG
  source 1..20: mol_type = other DNA
tggcacgatcttggctcact

SEQ ID NO: 18001 - DNA, 20 bp, synthetic construct
  misc_feature 1..20: note = Description of Artificial Sequence: Synthetic oligonucleotide
  misc_feature 1..20: note = Target: ANGPTL4; (+) strand; PAM type: YTN; PAM sequence: CTT
  source 1..20: mol_type = other DNA
ggctcactgcaagctccacc

SEQ ID NO: 18002 - DNA, 20 bp, synthetic construct
  misc_feature 1..20: note = Description of Artificial Sequence: Synthetic oligonucleotide
  misc_feature 1..20: note = Target: ANGPTL4; (+) strand; PAM type: YTN; PAM sequence: TTG
  source 1..20: mol_type = other DNA
gctcactgcaagctccacct

SEQ ID NO: 18003 - DNA, 20 bp, synthetic construct
  misc_feature 1..20: note = Description of Artificial Sequence: Synthetic oligonucleotide
  misc_feature 1..20: note = Target: ANGPTL4; (+) strand; PAM type: YTN; PAM sequence: CTC
  source 1..20: mol_type = other DNA
actgcaagctccacctcctg

SEQ ID NO: 18004 - DNA, 20 bp, synthetic construct
  misc_feature 1..20: note = Description of Artificial Sequence: Synthetic oligonucleotide
  misc_feature 1..20: note = Target: ANGPTL4; (+) strand; PAM type: YTN; PAM sequence: CTG
  source 1..20: mol_type = other DNA
caagctccacctcctgagtt

SEQ ID NO: 18005 - DNA, 20 bp, synthetic construct
  misc_feature 1..20: note = Description of Artificial Sequence: Synthetic oligonucleotide
  misc_feature 1..20: note = Target: ANGPTL4; (+) strand; PAM type: YTN; PAM sequence: CTC
  source 1..20: mol_type = other DNA
cacctcctgagttcacacca

SEQ ID NO: 18006 - DNA, 20 bp, synthetic construct
  misc_feature 1..20: note = Description of Artificial Sequence: Synthetic oligonucleotide
  misc_feature 1..20: note = Target: ANGPTL4; (+) strand; PAM type: YTN; PAM sequence: CTC
  source 1..20: mol_type = other DNA
ctgagttcacaccattctcc

SEQ ID NO: 18007 - DNA, 20 bp, synthetic construct
  misc_feature 1..20: note = Description of Artificial Sequence: Synthetic oligonucleotide
  misc_feature 1..20: note = Target: ANGPTL4; (+) strand; PAM type: YTN; PAM sequence: CTG
  source 1..20: mol_type = other DNA
agttcacaccattctcctgc

SEQ ID NO: 18008 - DNA, 20 bp, synthetic construct
  misc_feature 1..20: note = Description of Artificial Sequence: Synthetic oligonucleotide
  misc_feature 1..20: note = Target: ANGPTL4; (+) strand; PAM type: YTN; PAM sequence: TTC
  source 1..20: mol_type = other DNA
acaccattctcctgcctcag

SEQ ID NO: 18009 - DNA, 20 bp, synthetic construct
  misc_feature 1..20: note = Description of Artificial Sequence: Synthetic oligonucleotide
  misc_feature 1..20: note = Target: ANGPTL4; (+) strand; PAM type: YTN; PAM sequence: TTC
  source 1..20: mol_type = other DNA
tcctgcctcagcctcccgag

SEQ ID NO: 18010 - DNA, 20 bp, synthetic construct
  misc_feature 1..20: note = Description of Artificial Sequence: Synthetic oligonucleotide
  misc_feature 1..20: note = Target: ANGPTL4; (+) strand; PAM type: YTN; PAM sequence: CTC
  source 1..20: mol_type = other DNA
ctgcctcagcctcccgagta

SEQ ID NO: 18011 - DNA, 20 bp, synthetic construct
  misc_feature 1..20: note = Description of Artificial Sequence: Synthetic oligonucleotide
  misc_feature 1..20: note = Target: ANGPTL4; (+) strand; PAM type: YTN; PAM sequence: CTG
  source 1..20: mol_type = other DNA
cctcagcctcccgagtagct

SEQ ID NO: 18012 - DNA, 20 bp, synthetic construct
  misc_feature 1..20: note = Description of Artificial Sequence: Synthetic oligonucleotide
  misc_feature 1..20: note = Target: ANGPTL4; (+) strand; PAM type: YTN; PAM sequence: CTC
  source 1..20: mol_type = other DNA
agcctcccgagtagctggga

SEQ ID NO: 18013 - DNA, 20 bp, synthetic construct
  misc_feature 1..20: note = Description of Artificial Sequence: Synthetic oligonucleotide
  misc_feature 1..20: note = Target: ANGPTL4; (+) strand; PAM type: YTN; PAM sequence: CTC
  source 1..20: mol_type = other DNA
ccgagtagctgggactatag

SEQ ID NO: 18014 - DNA, 20 bp, synthetic construct
  misc_feature 1..20: note = Description of Artificial Sequence: Synthetic oligonucleotide
  misc_feature 1..20: note = Target: ANGPTL4; (+) strand; PAM type: YTN; PAM sequence: CTG
  source 1..20: mol_type = other DNA
ggactataggtgcccaccac

SEQ ID NO: 18015 - DNA, 20 bp, synthetic construct
  misc_feature 1..20: note = Description of Artificial Sequence: Synthetic oligonucleotide
  misc_feature 1..20: note = Target: ANGPTL4; (+) strand; PAM type: YTN; PAM sequence: CTA
  source 1..20: mol_type = other DNA
taggtgcccaccaccacgcc

SEQ ID NO: 18016 - DNA, 20 bp, synthetic construct
  misc_feature 1..20: note = Description of Artificial Sequence: Synthetic oligonucleotide
  misc_feature 1..20: note = Target: ANGPTL4; (+) strand; PAM type: YTN; PAM sequence: CTG
  source 1..20: mol_type = other DNA
gctaatttttttgtattttt

SEQ ID NO: 18017 - DNA, 20 bp, synthetic construct
  misc_feature 1..20: note = Description of Artificial Sequence: Synthetic oligonucleotide
  misc_feature 1..20: note = Target: ANGPTL4; (+) strand; PAM type: YTN; PAM sequence: CTA
  source 1..20: mol_type = other DNA
atttttttgtatttttagta

SEQ ID NO: 18018 - DNA, 20 bp, synthetic construct
  misc_feature 1..20: note = Description of Artificial Sequence: Synthetic oligonucleotide
  misc_feature 1..20: note = Target: ANGPTL4; (+) strand; PAM type: YTN; PAM sequence: TTT
  source 1..20: mol_type = other DNA
ttttgtatttttagtagaga

SEQ ID NO: 18019 - DNA, 20 bp, synthetic construct
  misc_feature 1..20: note = Description of Artificial Sequence: Synthetic oligonucleotide
  misc_feature 1..20: note = Target: ANGPTL4; (+) strand; PAM type: YTN; PAM sequence: TTT
  source 1..20: mol_type = other DNA
tttgtatttttagtagagat

SEQ ID NO: 18020 - DNA, 20 bp, synthetic construct
  misc_feature 1..20: note = Description of Artificial Sequence: Synthetic oligonucleotide
  misc_feature 1..20: note = Target: ANGPTL4; (+) strand; PAM type: YTN; PAM sequence: TTT
  source 1..20: mol_type = other DNA
ttgtatttttagtagagatg

SEQ ID NO: 18021 - DNA, 20 bp, synthetic construct
  misc_feature 1..20: note = Description of Artificial Sequence: Synthetic oligonucleotide
  misc_feature 1..20: note = Target: ANGPTL4; (+) strand; PAM type: YTN; PAM sequence: TTT
  source 1..20: mol_type = other DNA
tgtatttttagtagagatgg

SEQ ID NO: 18022 - DNA, 20 bp, synthetic construct
  misc_feature 1..20: note = Description of Artificial Sequence: Synthetic oligonucleotide
  misc_feature 1..20: note = Target: ANGPTL4; (+) strand; PAM type: YTN; PAM sequence: TTT
  source 1..20: mol_type = other DNA
gtatttttagtagagatggg

SEQ ID NO: 18023 - DNA, 20 bp, synthetic construct
  misc_feature 1..20: note = Description of Artificial Sequence: Synthetic oligonucleotide
  misc_feature 1..20: note = Target: ANGPTL4; (+) strand; PAM type: YTN; PAM sequence: TTG
  source 1..20: mol_type = other DNA
tatttttagtagagatgggg

SEQ ID NO: 18024 - DNA, 20 bp, synthetic construct
  misc_feature 1..20: note = Description of Artificial Sequence: Synthetic oligonucleotide
  misc_feature 1..20: note = Target: ANGPTL4; (+) strand; PAM type: YTN; PAM sequence: TTT
  source 1..20: mol_type = other DNA
ttagtagagatggggtttca

SEQ ID NO: 18025 - DNA, 20 bp, synthetic construct
  misc_feature 1..20: note = Description of Artificial Sequence: Synthetic oligonucleotide
  misc_feature 1..20: note = Target: ANGPTL4; (+) strand; PAM type: YTN; PAM sequence: TTT
  source 1..20: mol_type = other DNA
tagtagagatggggtttcac

SEQ ID NO: 18026 - DNA, 20 bp, synthetic construct
  misc_feature 1..20: note = Description of Artificial Sequence: Synthetic oligonucleotide
  misc_feature 1..20: note = Target: ANGPTL4; (+) strand; PAM type: YTN; PAM sequence: TTT
  source 1..20: mol_type = other DNA
agtagagatggggtttcacc

SEQ ID NO: 18027 - DNA, 20 bp, synthetic construct
  misc_feature 1..20: note = Description of Artificial Sequence: Synthetic oligonucleotide
  misc_feature 1..20: note = Target: ANGPTL4; (+) strand; PAM type: YTN; PAM sequence: TTA
  source 1..20: mol_type = other DNA
gtagagatggggtttcaccg

SEQ ID NO: 18028 - DNA, 20 bp, synthetic construct
  misc_feature 1..20: note = Description of Artificial Sequence: Synthetic oligonucleotide
  misc_feature 1..20: note = Target: ANGPTL4; (+) strand; PAM type: YTN; PAM sequence: TTT
  source 1..20: mol_type = other DNA
caccgtgttagccaggatgg

SEQ ID NO: 18029 - DNA, 20 bp, synthetic construct
  misc_feature 1..20: note = Description of Artificial Sequence: Synthetic oligonucleotide
  misc_feature 1..20: note = Target: ANGPTL4; (+) strand; PAM type: YTN; PAM sequence: TTC
  source 1..20: mol_type = other DNA
accgtgttagccaggatggt

SEQ ID NO: 18030 - DNA, 20 bp, synthetic construct
  misc_feature 1..20: note = Description of Artificial Sequence: Synthetic oligonucleotide
  misc_feature 1..20: note = Target: ANGPTL4; (+) strand; PAM type: YTN; PAM sequence: TTA
  source 1..20: mol_type = other DNA
gccaggatggtctcgatctc

SEQ ID NO: 18031 - DNA, 20 bp, synthetic construct
  misc_feature 1..20: note = Description of Artificial Sequence: Synthetic oligonucleotide
  misc_feature 1..20: note = Target: ANGPTL4; (+) strand; PAM type: YTN; PAM sequence: CTC
  source 1..20: mol_type = other DNA
gatctcctgacctcgtgatc

SEQ ID NO: 18032 - DNA, 20 bp, synthetic construct
  misc_feature 1..20: note = Description of Artificial Sequence: Synthetic oligonucleotide
  misc_feature 1..20: note = Target: ANGPTL4; (+) strand; PAM type: YTN; PAM sequence: CTC
  source 1..20: mol_type = other DNA
ctgacctcgtgatctgcctg

SEQ ID NO: 18033 - DNA, 20 bp, synthetic construct
  misc_feature 1..20: note = Description of Artificial Sequence: Synthetic oligonucleotide
  misc_feature 1..20: note = Target: ANGPTL4; (+) strand; PAM type: YTN; PAM sequence: CTG
  source 1..20: mol_type = other DNA
acctcgtgatctgcctgcct

SEQ ID NO: 18034 - DNA, 20 bp, synthetic construct
  misc_feature 1..20: note = Description of Artificial Sequence: Synthetic oligonucleotide
  misc_feature 1..20: note = Target: ANGPTL4; (+) strand; PAM type: YTN; PAM sequence: CTC
  source 1..20: mol_type = other DNA
gtgatctgcctgcctcagcc

SEQ ID NO: 18035 - DNA, 20 bp, synthetic construct
  misc_feature 1..20: note = Description of Artificial Sequence: Synthetic oligonucleotide
  misc_feature 1..20: note = Target: ANGPTL4; (+) strand; PAM type: YTN; PAM sequence: CTG
  source 1..20: mol_type = other DNA
cctgcctcagcctcccaaag

SEQ ID NO: 18036 - DNA, 20 bp, synthetic construct
  misc_feature 1..20: note = Description of Artificial Sequence: Synthetic oligonucleotide
  misc_feature 1..20: note = Target: ANGPTL4; (+) strand; PAM type: YTN; PAM sequence: CTG
  source 1..20: mol_type = other DNA
cctcagcctcccaaagtgct

SEQ ID NO: 18037 - DNA, 20 bp, synthetic construct
  misc_feature 1..20: note = Description of Artificial Sequence: Synthetic oligonucleotide
  misc_feature 1..20: note = Target: ANGPTL4; (+) strand; PAM type: YTN; PAM sequence: CTC
  source 1..20: mol_type = other DNA
agcctcccaaagtgctggga

SEQ ID NO: 18038 - DNA, 20 bp, synthetic construct
  misc_feature 1..20: note = Description of Artificial Sequence: Synthetic oligonucleotide
  misc_feature 1..20: note = Target: ANGPTL4; (+) strand; PAM type: YTN; PAM sequence: CTC
  source 1..20: mol_type = other DNA
ccaaagtgctgggattacag

SEQ ID NO: 18039 - DNA, 20 bp, synthetic construct
  misc_feature 1..20: note = Description of Artificial Sequence: Synthetic oligonucleotide
  misc_feature 1..20: note = Target: ANGPTL4; (+) strand; PAM type: YTN; PAM sequence: CTG
  source 1..20: mol_type = other DNA
ggattacaggcgtgagccac

SEQ ID NO: 18040 - DNA, 20 bp, synthetic construct
  misc_feature 1..20: note = Description of Artificial Sequence: Synthetic oligonucleotide
  misc_feature 1..20: note = Target: ANGPTL4; (+) strand; PAM type: YTN; PAM sequence: TTA
  source 1..20: mol_type = other DNA
caggcgtgagccaccgcgcc

SEQ ID NO: 18041 - DNA, 20 bp, synthetic construct
  misc_feature 1..20: note = Description of Artificial Sequence: Synthetic oligonucleotide
  misc_feature 1..20: note = Target: ANGPTL4; (+) strand; PAM type: YTN; PAM sequence: CTA
  source 1..20: mol_type = other DNA
cttatttattttttgagaca

SEQ ID NO: 18042 - DNA, 20 bp, synthetic construct
  misc_feature 1..20: note = Description of Artificial Sequence: Synthetic oligonucleotide
  misc_feature 1..20: note = Target: ANGPTL4; (+) strand; PAM type: YTN; PAM sequence: CTT
  source 1..20: mol_type = other DNA
atttattttttgagacagag

SEQ ID NO: 18043 - DNA, 20 bp, synthetic construct
  misc_feature 1..20: note = Description of Artificial Sequence: Synthetic oligonucleotide
  misc_feature 1..20: note = Target: ANGPTL4; (+) strand; PAM type: YTN; PAM sequence: TTA
  source 1..20: mol_type = other DNA
tttattttttgagacagagt

SEQ ID NO: 18044 - DNA, 20 bp, synthetic construct
  misc_feature 1..20: note = Description of Artificial Sequence: Synthetic oligonucleotide
  misc_feature 1..20: note = Target: ANGPTL4; (+) strand; PAM type: YTN; PAM sequence: TTT
  source 1..20: mol_type = other DNA
attttttgagacagagtccc

SEQ ID NO: 18045 - DNA, 20 bp, synthetic construct
  misc_feature 1..20: note = Description of Artificial Sequence: Synthetic oligonucleotide
  misc_feature 1..20: note = Target: ANGPTL4; (+) strand; PAM type: YTN; PAM sequence: TTA
  source 1..20: mol_type = other DNA
ttttttgagacagagtcccg

SEQ ID NO: 18046 - DNA, 20 bp, synthetic construct
  misc_feature 1..20: note = Description of Artificial Sequence: Synthetic oligonucleotide
  misc_feature 1..20: note = Target: ANGPTL4; (+) strand; PAM type: YTN; PAM sequence: TTT
  source 1..20: mol_type = other DNA
tttgagacagagtcccgctg

SEQ ID NO: 18047 - DNA, 20 bp, synthetic construct
  misc_feature 1..20: note = Description of Artificial Sequence: Synthetic oligonucleotide
  misc_feature 1..20: note = Target: ANGPTL4; (+) strand; PAM type: YTN; PAM sequence: TTT
  source 1..20: mol_type = other DNA
ttgagacagagtcccgctgt

SEQ ID NO: 18048 - DNA, 20 bp, synthetic construct
  misc_feature 1..20: note = Description of Artificial Sequence: Synthetic oligonucleotide
  misc_feature 1..20: note = Target: ANGPTL4; (+) strand; PAM type: YTN; PAM sequence: TTT
  source 1..20: mol_type = other DNA
tgagacagagtcccgctgtg

SEQ ID NO: 18049 - DNA, 20 bp, synthetic construct
  misc_feature 1..20: note = Description of Artificial Sequence: Synthetic oligonucleotide
  misc_feature 1..20: note = Target: ANGPTL4; (+) strand; PAM type: YTN; PAM sequence: TTT
  source 1..20: mol_type = other DNA
gagacagagtcccgctgtgt

SEQ ID NO: 18050 - DNA, 20 bp, synthetic construct
  misc_feature 1..20: note = Description of Artificial Sequence: Synthetic oligonucleotide
  misc_feature 1..20: note = Target: ANGPTL4; (+) strand; PAM type: YTN; PAM sequence: TTG
  source 1..20: mol_type = other DNA
agacagagtcccgctgtgtc

SEQ ID NO: 18051 - DNA, 20 bp, synthetic construct
  misc_feature 1..20: note = Description of Artificial Sequence: Synthetic oligonucleotide
  misc_feature 1..20: note = Target: ANGPTL4; (+) strand; PAM type: YTN; PAM sequence: CTG
  source 1..20: mol_type = other DNA
tgtctcccaggctggagtgc

SEQ ID NO: 18052 - DNA, 20 bp, synthetic construct
  misc_feature 1..20: note = Description of Artificial Sequence: Synthetic oligonucleotide
  misc_feature 1..20: note = Target: ANGPTL4; (+) strand; PAM type: YTN; PAM sequence: CTC
  source 1..20: mol_type = other DNA
ccaggctggagtgcaagtga

SEQ ID NO: 18053 - DNA, 20 bp, synthetic construct
  misc_feature 1..20: note = Description of Artificial Sequence: Synthetic oligonucleotide
  misc_feature 1..20: note = Target: ANGPTL4; (+) strand; PAM type: YTN; PAM sequence: CTG
  source 1..20: mol_type = other DNA
gagtgcaagtgacgtgatct

SEQ ID NO: 18054 - DNA, 20 bp, synthetic construct
  misc_feature 1..20: note = Description of Artificial Sequence: Synthetic oligonucleotide
  misc_feature 1..20: note = Target: ANGPTL4; (+) strand; PAM type: YTN; PAM sequence: CTT
  source 1..20: mol_type = other DNA
ggctcactgcagcctccgcc

SEQ ID NO: 18055 - DNA, 20 bp, synthetic construct
  misc_feature 1..20: note = Description of Artificial Sequence: Synthetic oligonucleotide
  misc_feature 1..20: note = Target: ANGPTL4; (+) strand; PAM type: YTN; PAM sequence: TTG
  source 1..20: mol_type = other DNA
gctcactgcagcctccgcct

SEQ ID NO: 18056 - DNA, 20 bp, synthetic construct
  misc_feature 1..20: note = Description of Artificial Sequence: Synthetic oligonucleotide
  misc_feature 1..20: note = Target: ANGPTL4; (+) strand; PAM type: YTN; PAM sequence: CTC
  source 1..20: mol_type = other DNA
actgcagcctccgcctcctg

SEQ ID NO: 18057 - DNA, 20 bp, synthetic construct
  misc_feature 1..20: note = Description of Artificial Sequence: Synthetic oligonucleotide
  misc_feature 1..20: note = Target: ANGPTL4; (+) strand; PAM type: YTN; PAM sequence: CTG
  source 1..20: mol_type = other DNA
cagcctccgcctcctgggtt

SEQ ID NO: 18058 - DNA, 20 bp, synthetic construct
  misc_feature 1..20: note = Description of Artificial Sequence: Synthetic oligonucleotide
  misc_feature 1..20: note = Target: ANGPTL4; (+) strand; PAM type: YTN; PAM sequence: CTC
  source 1..20: mol_type = other DNA
cgcctcctgggttcaagtga

SEQ ID NO: 18059 - DNA, 20 bp, synthetic construct
  misc_feature 1..20: note = Description of Artificial Sequence: Synthetic oligonucleotide
  misc_feature 1..20: note = Target: ANGPTL4; (+) strand; PAM type: YTN; PAM sequence: CTC
  source 1..20: mol_type = other DNA
ctgggttcaagtgattctcc

SEQ ID NO: 18060 - DNA, 20 bp, synthetic construct
  misc_feature 1..20: note = Description of Artificial Sequence: Synthetic oligonucleotide
  misc_feature 1..20: note = Target: ANGPTL4; (+) strand; PAM type: YTN; PAM sequence: CTG
  source 1..20: mol_type = other DNA
ggttcaagtgattctcctgc

SEQ ID NO: 18061 - DNA, 20 bp, synthetic construct
  misc_feature 1..20: note = Description of Artificial Sequence: Synthetic oligonucleotide
  misc_feature 1..20: note = Target: ANGPTL4; (+) strand; PAM type: YTN; PAM sequence: TTC
  source 1..20: mol_type = other DNA
aagtgattctcctgcctcag

SEQ ID NO: 18062 - DNA, 20 bp, synthetic construct
  misc_feature 1..20: note = Description of Artificial Sequence: Synthetic oligonucleotide
  misc_feature 1..20: note = Target: ANGPTL4; (+) strand; PAM type: YTN; PAM sequence: TTC
  source 1..20: mol_type = other DNA
tcctgcctcagcctcctgag

SEQ ID NO: 18063 - DNA, 20 bp, synthetic construct
  misc_feature 1..20: note = Description of Artificial Sequence: Synthetic oligonucleotide
  misc_feature 1..20: note = Target: ANGPTL4; (+) strand; PAM type: YTN; PAM sequence: CTC
  source 1..20: mol_type = other DNA
ctgcctcagcctcctgagta

SEQ ID NO: 18064 - DNA, 20 bp, synthetic construct
  misc_feature 1..20: note = Description of Artificial Sequence: Synthetic oligonucleotide
  misc_feature 1..20: note = Target: ANGPTL4; (+) strand; PAM type: YTN; PAM sequence: CTG
  source 1..20: mol_type = other DNA
cctcagcctcctgagtagct

SEQ ID NO: 18065 - DNA, 20 bp, synthetic construct
  misc_feature 1..20: note = Description of Artificial Sequence: Synthetic oligonucleotide
  misc_feature 1..20: note = Target: ANGPTL4; (+) strand; PAM type: YTN; PAM sequence: CTC
  source 1..20: mol_type = other DNA
agcctcctgagtagctggga

SEQ ID NO: 18066 - DNA, 20 bp, synthetic construct
  misc_feature 1..20: note = Description of Artificial Sequence: Synthetic oligonucleotide
  misc_feature 1..20: note = Target: ANGPTL4; (+) strand; PAM type: YTN; PAM sequence: CTC
  source 1..20: mol_type = other DNA
ctgagtagctgggattacag

SEQ ID NO: 18067 - DNA, 20 bp, synthetic construct
  misc_feature 1..20: note = Description of Artificial Sequence: Synthetic oligonucleotide
  misc_feature 1..20: note = Target: ANGPTL4; (+) strand; PAM type: YTN; PAM sequence: CTG
  source 1..20: mol_type = other DNA
agtagctgggattacaggtt

SEQ ID NO: 18068 - DNA, 20 bp, synthetic construct
  misc_feature 1..20: note = Description of Artificial Sequence: Synthetic oligonucleotide
  misc_feature 1..20: note = Target: ANGPTL4; (+) strand; PAM type: YTN; PAM sequence: CTG
  source 1..20: mol_type = other DNA
ggattacaggttcccgccac

SEQ ID NO: 18069 - DNA, 20 bp, synthetic construct
  misc_feature 1..20: note = Description of Artificial Sequence: Synthetic oligonucleotide
  misc_feature 1..20: note = Target: ANGPTL4; (+) strand; PAM type: YTN; PAM sequence: TTA
  source 1..20: mol_type = other DNA
caggttcccgccaccatgca

SEQ ID NO: 18070 - DNA, 20 bp, synthetic construct
  misc_feature 1..20: note = Description of Artificial Sequence: Synthetic oligonucleotide
  misc_feature 1..20: note = Target: ANGPTL4; (+) strand; PAM type: YTN; PAM sequence: TTC
  source 1..20: mol_type = other DNA
ccgccaccatgcacagataa

SEQ ID NO: 18071 - DNA, 20 bp, synthetic construct
  misc_feature 1..20: note = Description of Artificial Sequence: Synthetic oligonucleotide
  misc_feature 1..20: note = Target: ANGPTL4; (+) strand; PAM type: YTN; PAM sequence: TTG
  source 1..20: mol_type = other DNA
ttttgtatttttagtagaga

SEQ ID NO: 18072 - DNA, 20 bp, synthetic construct
  misc_feature 1..20: note = Description of Artificial Sequence: Synthetic oligonucleotide
  misc_feature 1..20: note = Target: ANGPTL4; (+) strand; PAM type: YTN; PAM sequence: TTT
  source 1..20: mol_type = other DNA
tgtatttttagtagagacgg

SEQ ID NO: 18073 - DNA, 20 bp, synthetic construct
  misc_feature 1..20: note = Description of Artificial Sequence: Synthetic oligonucleotide
  misc_feature 1..20: note = Target: ANGPTL4; (+) strand; PAM type: YTN; PAM sequence: TTT
  source 1..20: mol_type = other DNA
gtatttttagtagagacggg

SEQ ID NO: 18074 - DNA, 20 bp, synthetic construct
  misc_feature 1..20: note = Description of Artificial Sequence: Synthetic oligonucleotide
  misc_feature 1..20: note = Target: ANGPTL4; (+) strand; PAM type: YTN; PAM sequence: TTG
  source 1..20: mol_type = other DNA
tatttttagtagagacgggg

SEQ ID NO: 18075 - DNA, 20 bp, synthetic construct
  misc_feature 1..20: note = Description of Artificial Sequence: Synthetic oligonucleotide
  misc_feature 1..20: note = Target: ANGPTL4; (+) strand; PAM type: YTN; PAM sequence: TTT
  source 1..20: mol_type = other DNA
ttagtagagacggggtttca

SEQ ID NO: 18076 - DNA, 20 bp, synthetic construct
  misc_feature 1..20: note = Description of Artificial Sequence: Synthetic oligonucleotide
  misc_feature 1..20: note = Target: ANGPTL4; (+) strand; PAM type: YTN; PAM sequence: TTT
  source 1..20: mol_type = other DNA
tagtagagacggggtttcac

SEQ ID NO: 18077 - DNA, 20 bp, synthetic construct
  misc_feature 1..20: note = Description of Artificial Sequence: Synthetic oligonucleotide
  misc_feature 1..20: note = Target: ANGPTL4; (+) strand; PAM type: YTN; PAM sequence: TTT
  source 1..20: mol_type = other DNA
agtagagacggggtttcacc

SEQ ID NO: 18078 - DNA, 20 bp, synthetic construct
  misc_feature 1..20: note = Description of Artificial Sequence: Synthetic oligonucleotide
  misc_feature 1..20: note = Target: ANGPTL4; (+) strand; PAM type: YTN; PAM sequence: TTA
  source 1..20: mol_type = other DNA
gtagagacggggtttcacca

SEQ ID NO: 18079 - DNA, 20 bp, synthetic construct
  misc_feature 1..20: note = Description of Artificial Sequence: Synthetic oligonucleotide
  misc_feature 1..20: note = Target: ANGPTL4; (+) strand; PAM type: YTN; PAM sequence: TTT
  source 1..20: mol_type = other DNA
caccatgttggccagggtgg

SEQ ID NO: 18080 - DNA, 20 bp, synthetic construct
  misc_feature 1..20: note = Description of Artificial Sequence: Synthetic oligonucleotide
  misc_feature 1..20: note = Target: ANGPTL4; (+) strand; PAM type: YTN; PAM sequence: TTC
  source 1..20: mol_type = other DNA
accatgttggccagggtggt

SEQ ID NO: 18081 - DNA, 20 bp, synthetic construct
  misc_feature 1..20: note = Description of Artificial Sequence: Synthetic oligonucleotide
  misc_feature 1..20: note = Target: ANGPTL4; (+) strand; PAM type: YTN; PAM sequence: TTG
  source 1..20: mol_type = other DNA
gccagggtggtcttgaactc

SEQ ID NO: 18082 - DNA, 20 bp, synthetic construct
  misc_feature 1..20: note = Description of Artificial Sequence: Synthetic oligonucleotide
  misc_feature 1..20: note = Target: ANGPTL4; (+) strand; PAM type: YTN; PAM sequence: CTT
  source 1..20: mol_type = other DNA
gaactcctgacctcaagtga

SEQ ID NO: 18083 - DNA, 20 bp, synthetic construct
  misc_feature 1..20: note = Description of Artificial Sequence: Synthetic oligonucleotide
  misc_feature 1..20: note = Target: ANGPTL4; (+) strand; PAM type: YTN; PAM sequence: TTG
  source 1..20: mol_type = other DNA
aactcctgacctcaagtgat

SEQ ID NO: 18084 - DNA, 20 bp, synthetic construct
  misc_feature 1..20: note = Description of Artificial Sequence: Synthetic oligonucleotide
  misc_feature 1..20: note = Target: ANGPTL4; (+) strand; PAM type: YTN; PAM sequence: CTC
  source 1..20: mol_type = other DNA
ctgacctcaagtgatctgcc

SEQ ID NO: 18085 - DNA, 20 bp, synthetic construct
  misc_feature 1..20: note = Description of Artificial Sequence: Synthetic oligonucleotide
  misc_feature 1..20: note = Target: ANGPTL4; (+) strand; PAM type: YTN; PAM sequence: CTG
  source 1..20: mol_type = other DNA
acctcaagtgatctgcccac

SEQ ID NO: 18086 - DNA, 20 bp, synthetic construct
  misc_feature 1..20: note = Description of Artificial Sequence: Synthetic oligonucleotide
  misc_feature 1..20: note = Target: ANGPTL4; (+) strand; PAM type: YTN; PAM sequence: CTC
  source 1..20: mol_type = other DNA
aagtgatctgcccacctcgg

SEQ ID NO: 18087 - DNA, 20 bp, synthetic construct
  misc_feature 1..20: note = Description of Artificial Sequence: Synthetic oligonucleotide
  misc_feature 1..20: note = Target: ANGPTL4; (+) strand; PAM type: YTN; PAM sequence: CTG
  source 1..20: mol_type = other DNA
cccacctcggcctcccaaag

SEQ ID NO: 18088 - DNA, 20 bp, synthetic construct
  misc_feature 1..20: note = Description of Artificial Sequence: Synthetic oligonucleotide
  misc_feature 1..20: note = Target: ANGPTL4; (+) strand; PAM type: YTN; PAM sequence: CTC
  source 1..20: mol_type = other DNA
ggcctcccaaagtgttggga

SEQ ID NO: 18089 - DNA, 20 bp, synthetic construct
  misc_feature 1..20: note = Description of Artificial Sequence: Synthetic oligonucleotide
  misc_feature 1..20: note = Target: ANGPTL4; (+) strand; PAM type: YTN; PAM sequence: CTC
  source 1..20: mol_type = other DNA
ccaaagtgttgggattacag

SEQ ID NO: 18090 - DNA, 20 bp, synthetic construct
  misc_feature 1..20: note = Description of Artificial Sequence: Synthetic oligonucleotide
  misc_feature 1..20: note = Target: ANGPTL4; (+) strand; PAM type: YTN; PAM sequence: TTG
  source 1..20: mol_type = other DNA
ggattacaggcgtgagccac

SEQ ID NO: 18091 - DNA, 20 bp, synthetic construct
  misc_feature 1..20: note = Description of Artificial Sequence: Synthetic oligonucleotide
  misc_feature 1..20: note = Target: ANGPTL4; (+) strand; PAM type: YTN; PAM sequence: TTA
  source 1..20: mol_type = other DNA
caggcgtgagccacaatacc

SEQ ID NO: 18092 - DNA, 20 bp, synthetic construct
  misc_feature 1..20: note = Description of Artificial Sequence: Synthetic oligonucleotide
  misc_feature 1..20: note = Target: ANGPTL4; (+) strand; PAM type: YTN; PAM sequence: CTT
  source 1..20: mol_type = other DNA
tataatggtgctccacagga

SEQ ID NO: 18093 - DNA, 20 bp, synthetic construct
  misc_feature 1..20: note = Description of Artificial Sequence: Synthetic oligonucleotide
  misc_feature 1..20: note = Target: ANGPTL4; (+) strand; PAM type: YTN; PAM sequence: TTT
  source 1..20: mol_type = other DNA
ataatggtgctccacaggat

SEQ ID NO: 18094 - DNA, 20 bp, synthetic construct
  misc_feature 1..20: note = Description of Artificial Sequence: Synthetic oligonucleotide
  misc_feature 1..20: note = Target: ANGPTL4; (+) strand; PAM type: YTN; PAM sequence: TTA
  source 1..20: mol_type = other DNA
taatggtgctccacaggatt

SEQ ID NO: 18095 - DNA, 20 bp, synthetic construct
  misc_feature 1..20: note = Description of Artificial Sequence: Synthetic oligonucleotide
  misc_feature 1..20: note = Target: ANGPTL4; (+) strand; PAM type: YTN; PAM sequence: CTC
  source 1..20: mol_type = other DNA
cacaggattctttttttttt

SEQ ID NO: 18096 - DNA, 20 bp, synthetic construct
  misc_feature 1..20: note = Description of Artificial Sequence: Synthetic oligonucleotide
  misc_feature 1..20: note = Target: ANGPTL4; (+) strand; PAM type: YTN; PAM sequence: TTC
  source 1..20: mol_type = other DNA
tttttttttttttttttttg

SEQ ID NO: 18097 - DNA, 20 bp, synthetic construct
  misc_feature 1..20: note = Description of Artificial Sequence: Synthetic oligonucleotide
  misc_feature 1..20: note = Target: ANGPTL4; (+) strand; PAM type: YTN; PAM sequence: CTT
  source 1..20: mol_type = other DNA
tttttttttttttttttgaa

SEQ ID NO: 18098 - DNA, 20 bp, synthetic construct
  misc_feature 1..20: note = Description of Artificial Sequence: Synthetic oligonucleotide
  misc_feature 1..20: note = Target: ANGPTL4; (+) strand; PAM type: YTN; PAM sequence: TTT
  source 1..20: mol_type = other DNA
ttttttttttttttttgaaa

SEQ ID NO: 18099 - DNA, 20 bp, synthetic construct
  misc_feature 1..20: note = Description of Artificial Sequence: Synthetic oligonucleotide
  misc_feature 1..20: note = Target: ANGPTL4; (+) strand; PAM type: YTN; PAM sequence: TTT
  source 1..20: mol_type = other DNA
tttttttttttttttgaaac

SEQ ID NO: 18100 - DNA, 20 bp, synthetic construct
  misc_feature 1..20: note = Description of Artificial Sequence: Synthetic oligonucleotide
  misc_feature 1..20: note = Target: ANGPTL4; (+) strand; PAM type: YTN; PAM sequence: TTT
  source 1..20: mol_type = other DNA
ttttttttttttttgaaaca

SEQ ID NO: 18101 - DNA, 20 bp, synthetic construct
  misc_feature 1..20: note = Description of Artificial Sequence: Synthetic oligonucleotide
  misc_feature 1..20: note = Target: ANGPTL4; (+) strand; PAM type: YTN; PAM sequence: TTT
  source 1..20: mol_type = other DNA
tttttttttttttgaaacag

SEQ ID NO: 18102 - DNA, 20 bp, synthetic construct
  misc_feature 1..20: note = Description of Artificial Sequence: Synthetic oligonucleotide
  misc_feature 1..20: note = Target: ANGPTL4; (+) strand; PAM type: YTN; PAM sequence: TTT
  source 1..20: mol_type = other DNA
ttttttttttttgaaacagg

SEQ ID NO: 18103 - DNA, 20 bp, synthetic construct
  misc_feature 1..20: note = Description of Artificial Sequence: Synthetic oligonucleotide
  misc_feature 1..20: note = Target: ANGPTL4; (+) strand; PAM type: YTN; PAM sequence: TTT
  source 1..20: mol_type = other DNA
tttttttttttgaaacaggg

SEQ ID NO: 18104 - DNA, 20 bp, synthetic construct
  misc_feature 1..20: note = Description of Artificial Sequence: Synthetic oligonucleotide
  misc_feature 1..20: note = Target: ANGPTL4; (+) strand; PAM type: YTN; PAM sequence: TTT
  source 1..20: mol_type = other DNA
ttttttttttgaaacagggt

SEQ ID NO: 18105 - DNA, 20 bp, synthetic construct
  misc_feature 1..20: note = Description of Artificial Sequence: Synthetic oligonucleotide
  misc_feature 1..20: note = Target: ANGPTL4; (+) strand; PAM type: YTN; PAM sequence: TTT
  source 1..20: mol_type = other DNA
tttttttttgaaacagggtc

SEQ ID NO: 18106 - DNA, 20 bp, synthetic construct
  misc_feature 1..20: note = Description of Artificial Sequence: Synthetic oligonucleotide
  misc_feature 1..20: note = Target: ANGPTL4; (+) strand; PAM type: YTN; PAM sequence: TTT
  source 1..20: mol_type = other DNA
ttttttttgaaacagggtct

SEQ ID NO: 18107 - DNA, 20 bp, synthetic construct
  misc_feature 1..20: note = Description of Artificial Sequence: Synthetic oligonucleotide
  misc_feature 1..20: note = Target: ANGPTL4; (+) strand; PAM type: YTN; PAM sequence: TTT
  source 1..20: mol_type = other DNA
tttttttgaaacagggtctc

SEQ ID NO: 18108 - DNA, 20 bp, synthetic construct
  misc_feature 1..20: note = Description of Artificial Sequence: Synthetic oligonucleotide
  misc_feature 1..20: note = Target: ANGPTL4; (+) strand; PAM type: YTN; PAM sequence: TTT
  source 1..20: mol_type = other DNA
ttttttgaaacagggtctca

SEQ ID NO: 18109 - DNA, 20 bp, synthetic construct
  misc_feature 1..20: note = Description of Artificial Sequence: Synthetic oligonucleotide
  misc_feature 1..20: note = Target: ANGPTL4; (+) strand; PAM type: YTN; PAM sequence: TTT
  source 1..20: mol_type = other DNA
tttttgaaacagggtctcac

SEQ ID NO: 18110 - DNA, 20 bp, synthetic construct
  misc_feature 1..20: note = Description of Artificial Sequence: Synthetic oligonucleotide
  misc_feature 1..20: note = Target: ANGPTL4; (+) strand; PAM type: YTN; PAM sequence: TTT
  source 1..20: mol_type = other DNA
ttttgaaacagggtctcact

SEQ ID NO: 18111 - DNA, 20 bp, synthetic construct
  misc_feature 1..20: note = Description of Artificial Sequence: Synthetic oligonucleotide
  misc_feature 1..20: note = Target: ANGPTL4; (+) strand; PAM type: YTN; PAM sequence: TTT
  source 1..20: mol_type = other DNA
tttgaaacagggtctcactc

SEQ ID NO: 18112 - DNA, 20 bp, synthetic construct
  misc_feature 1..20: note = Description of Artificial Sequence: Synthetic oligonucleotide
  misc_feature 1..20: note = Target: ANGPTL4; (+) strand; PAM type: YTN; PAM sequence: TTT
  source 1..20: mol_type = other DNA
ttgaaacagggtctcactct

SEQ ID NO: 18113 - DNA, 20 bp, synthetic construct
  misc_feature 1..20: note = Description of Artificial Sequence: Synthetic oligonucleotide
  misc_feature 1..20: note = Target: ANGPTL4; (+) strand; PAM type: YTN; PAM sequence: TTT
  source 1..20: mol_type = other DNA
tgaaacagggtctcactctg

SEQ ID NO: 18114 - DNA, 20 bp, synthetic construct
  misc_feature 1..20: note = Description of Artificial Sequence: Synthetic oligonucleotide
  misc_feature 1..20: note = Target: ANGPTL4; (+) strand; PAM type: YTN; PAM sequence: TTT
  source 1..20: mol_type = other DNA
gaaacagggtctcactctgt

SEQ ID NO: 18115 - DNA, 20 bp, synthetic construct
  misc_feature 1..20: note = Description of Artificial Sequence: Synthetic oligonucleotide
  misc_feature 1..20: note = Target: ANGPTL4; (+) strand; PAM type: YTN; PAM sequence: TTG
  source 1..20: mol_type = other DNA
aaacagggtctcactctgtt

SEQ ID NO: 18116 - DNA, 20 bp, synthetic construct
  misc_feature 1..20: note = Description of Artificial Sequence: Synthetic oligonucleotide
  misc_feature 1..20: note = Target: ANGPTL4; (+) strand; PAM type: YTN; PAM sequence: CTC
  source 1..20: mol_type = other DNA
actctgttgcctaagctgga

SEQ ID NO: 18117 - DNA, 20 bp, synthetic construct
  misc_feature 1..20: note = Description of Artificial Sequence: Synthetic oligonucleotide
  misc_feature 1..20: note = Target: ANGPTL4; (+) strand; PAM type: YTN; PAM sequence: CTC
  source 1..20: mol_type = other DNA
tgttgcctaagctggagtgc

SEQ ID NO: 18118 - DNA, 20 bp, synthetic construct
  misc_feature 1..20: note = Description of Artificial Sequence: Synthetic oligonucleotide
  misc_feature 1..20: note = Target: ANGPTL4; (+) strand; PAM type: YTN; PAM sequence: CTG
  source 1..20: mol_type = other DNA
ttgcctaagctggagtgcag

SEQ ID NO: 18119 - DNA, 20 bp, synthetic construct
  misc_feature 1..20: note = Description of Artificial Sequence: Synthetic oligonucleotide
  misc_feature 1..20: note = Target: ANGPTL4; (+) strand; PAM type: YTN; PAM sequence: TTG
  source 1..20: mol_type = other DNA
cctaagctggagtgcagtgg

SEQ ID NO: 18120 - DNA, 20 bp, synthetic construct
  misc_feature 1..20: note = Description of Artificial Sequence: Synthetic oligonucleotide
  misc_feature 1..20: note = Target: ANGPTL4; (+) strand; PAM type: YTN; PAM sequence: CTA
  source 1..20: mol_type = other DNA
agctggagtgcagtggtgcg

SEQ ID NO: 18121 - DNA, 20 bp, synthetic construct
  misc_feature 1..20: note = Description of Artificial Sequence: Synthetic oligonucleotide
  misc_feature 1..20: note = Target: ANGPTL4; (+) strand; PAM type: YTN; PAM sequence: CTG
  source 1..20: mol_type = other DNA
gagtgcagtggtgcgatctc

SEQ ID NO: 18122 - DNA, 20 bp, synthetic construct
  misc_feature 1..20: note = Description of Artificial Sequence: Synthetic oligonucleotide
  misc_feature 1..20: note = Target: ANGPTL4; (+) strand; PAM type: YTN; PAM sequence: CTC
  source 1..20: mol_type = other DNA
ggctcactgcaacctccacc

SEQ ID NO: 18123 - DNA, 20 bp, synthetic construct
  misc_feature 1..20: note = Description of Artificial Sequence: Synthetic oligonucleotide
  misc_feature 1..20: note = Target: ANGPTL4; (+) strand; PAM type: YTN; PAM sequence: CTC
  source 1..20: mol_type = other DNA
actgcaacctccacctcccg

SEQ ID NO: 18124 - DNA, 20 bp, synthetic construct
  misc_feature 1..20: note = Description of Artificial Sequence: Synthetic oligonucleotide
  misc_feature 1..20: note = Target: ANGPTL4; (+) strand; PAM type: YTN; PAM sequence: CTG
  source 1..20: mol_type = other DNA
caacctccacctcccgggtt

SEQ ID NO: 18125 - DNA, 20 bp, synthetic construct
  misc_feature 1..20: note = Description of Artificial Sequence: Synthetic oligonucleotide
  misc_feature 1..20: note = Target: ANGPTL4; (+) strand; PAM type: YTN; PAM sequence: CTC
  source 1..20: mol_type = other DNA
cacctcccgggttcaagcaa

SEQ ID NO: 18126 - DNA, 20 bp, synthetic construct
  misc_feature 1..20: note = Description of Artificial Sequence: Synthetic oligonucleotide
  misc_feature 1..20: note = Target: ANGPTL4; (+) strand; PAM type: YTN; PAM sequence: CTC
  source 1..20: mol_type = other DNA
ccgggttcaagcaattctca

SEQ ID NO: 18127 - DNA, 20 bp, synthetic construct
  misc_feature 1..20: note = Description of Artificial Sequence: Synthetic oligonucleotide
  misc_feature 1..20: note = Target: ANGPTL4; (+) strand; PAM type: YTN; PAM sequence: TTC
  source 1..20: mol_type = other DNA
aagcaattctcaaaaaaaaa

SEQ ID NO: 18128 - DNA, 20 bp, synthetic construct
  misc_feature 1..20: note = Description of Artificial Sequence: Synthetic oligonucleotide
  misc_feature 1..20: note = Target: ANGPTL4; (+) strand; PAM type: YTN; PAM sequence: TTC
  source 1..20: mol_type = other DNA
tcaaaaaaaaaaaaaaatta

SEQ ID NO: 18129 - DNA, 20 bp, synthetic construct
  misc_feature 1..20: note = Description of Artificial Sequence: Synthetic oligonucleotide
  misc_feature 1..20: note = Target: ANGPTL4; (+) strand; PAM type: YTN; PAM sequence: CTC
  source 1..20: mol_type = other DNA
aaaaaaaaaaaaaaattagg

SEQ ID NO: 18130 - DNA, 20 bp, synthetic construct
  misc_feature 1..20: note = Description of Artificial Sequence: Synthetic oligonucleotide
  misc_feature 1..20: note = Target: ANGPTL4; (+) strand; PAM type: YTN; PAM sequence: TTA
  source 1..20: mol_type = other DNA
ggcacggtggctcacacttg

SEQ ID NO: 18131 - DNA, 20 bp, synthetic construct
  misc_feature 1..20: note = Description of Artificial Sequence: Synthetic oligonucleotide
  misc_feature 1..20: note = Target: ANGPTL4; (+) strand; PAM type: YTN; PAM sequence: CTC
  source 1..20: mol_type = other DNA
acacttgcaatcccagcact

SEQ ID NO: 18132 - DNA, 20 bp, synthetic construct
  misc_feature 1..20: note = Description of Artificial Sequence: Synthetic oligonucleotide
  misc_feature 1..20: note = Target: ANGPTL4; (+) strand; PAM type: YTN; PAM sequence: CTT
  source 1..20: mol_type = other DNA
gcaatcccagcactttggga

SEQ ID NO: 18133 - DNA, 20 bp, synthetic construct
  misc_feature 1..20: note = Description of Artificial Sequence: Synthetic oligonucleotide
  misc_feature 1..20: note = Target: ANGPTL4; (+) strand; PAM type: YTN; PAM sequence: TTG
  source 1..20: mol_type = other DNA
caatcccagcactttgggag

SEQ ID NO: 18134 - DNA, 20 bp, synthetic construct
  misc_feature 1..20: note = Description of Artificial Sequence: Synthetic oligonucleotide
  misc_feature 1..20: note = Target: ANGPTL4; (+) strand; PAM type: YTN; PAM sequence: CTT
  source 1..20: mol_type = other DNA
tgggaggctgaagcgagtgg

SEQ ID NO: 18135 - DNA, 20 bp, synthetic construct
  misc_feature 1..20: note = Description of Artificial Sequence: Synthetic oligonucleotide
  misc_feature 1..20: note = Target: ANGPTL4; (+) strand; PAM type: YTN; PAM sequence: TTT
  source 1..20: mol_type = other DNA
gggaggctgaagcgagtgga

SEQ ID NO: 18136 - DNA, 20 bp, synthetic construct
  misc_feature 1..20: note = Description of Artificial Sequence: Synthetic oligonucleotide
  misc_feature 1..20: note = Target: ANGPTL4; (+) strand; PAM type: YTN; PAM sequence: TTG
  source 1..20: mol_type = other DNA
ggaggctgaagcgagtggat

SEQ ID NO: 18137 - DNA, 20 bp, synthetic construct
  misc_feature 1..20: note = Description of Artificial Sequence: Synthetic oligonucleotide
  misc_feature 1..20: note = Target: ANGPTL4; (+) strand; PAM type: YTN; PAM sequence: CTG
  source 1..20: mol_type = other DNA
aagcgagtggatcacttgag

SEQ ID NO: 18138 - DNA, 20 bp, synthetic construct
  misc_feature 1..20: note = Description of Artificial Sequence: Synthetic oligonucleotide
  misc_feature 1..20: note = Target: ANGPTL4; (+) strand; PAM type: YTN; PAM sequence: CTT
  source 1..20: mol_type = other DNA
gagcccaggagaccaatctg

SEQ ID NO: 18139 - DNA, 20 bp, synthetic construct
  misc_feature 1..20: note = Description of Artificial Sequence: Synthetic oligonucleotide
  misc_feature 1..20: note = Target: ANGPTL4; (+) strand; PAM type: YTN; PAM sequence: TTG
  source 1..20: mol_type = other DNA
agcccaggagaccaatctga

SEQ ID NO: 18140 - DNA, 20 bp, synthetic construct
  misc_feature 1..20: note = Description of Artificial Sequence: Synthetic oligonucleotide
  misc_feature 1..20: note = Target: ANGPTL4; (+) strand; PAM type: YTN; PAM sequence: CTG
  source 1..20: mol_type = other DNA
agcaacagggcgaaatcctg

SEQ ID NO: 18141 - DNA, 20 bp, synthetic construct
  misc_feature 1..20: note = Description of Artificial Sequence: Synthetic oligonucleotide
  misc_feature 1..20: note = Target: ANGPTL4; (+) strand; PAM type: YTN; PAM sequence: CTG
  source 1..20: mol_type = other DNA
tctcaattaaaaatacaaaa

SEQ ID NO: 18142 - DNA, 20 bp, synthetic construct
  misc_feature 1..20: note = Description of Artificial Sequence: Synthetic oligonucleotide
  misc_feature 1..20: note = Target: ANGPTL4; (+) strand; PAM type: YTN; PAM sequence: CTC
  source 1..20: mol_type = other DNA
aattaaaaatacaaaaaact

SEQ ID NO: 18143 - DNA, 20 bp, synthetic construct
  misc_feature 1..20: note = Description of Artificial Sequence: Synthetic oligonucleotide
  misc_feature 1..20: note = Target: ANGPTL4; (+) strand; PAM type: YTN; PAM sequence: TTA
  source 1..20: mol_type = other DNA
aaaatacaaaaaactagctg

SEQ ID NO: 18144 - DNA, 20 bp, synthetic construct
  misc_feature 1..20: note = Description of Artificial Sequence: Synthetic oligonucleotide
  misc_feature 1..20: note = Target: ANGPTL4; (+) strand; PAM type: YTN; PAM sequence: CTA
  source 1..20: mol_type = other DNA
gctgggcatggtggtgcctg

SEQ ID NO: 18145 - DNA, 20 bp, synthetic construct
  misc_feature 1..20: note = Description of Artificial Sequence: Synthetic oligonucleotide
  misc_feature 1..20: note = Target: ANGPTL4; (+) strand; PAM type: YTN; PAM sequence: CTG
  source 1..20: mol_type = other DNA
ggcatggtggtgcctgcctg

SEQ ID NO: 18146 - DNA, 20 bp, synthetic construct
  misc_feature 1..20: note = Description of Artificial Sequence: Synthetic oligonucleotide
  misc_feature 1..20: note = Target: ANGPTL4; (+) strand; PAM type: YTN; PAM sequence: CTG
  source 1..20: mol_type = other DNA
cctgtgttcccatctacttg

SEQ ID NO: 18147 - DNA, 20 bp, synthetic construct
  misc_feature 1..20: note = Description of Artificial Sequence: Synthetic oligonucleotide
  misc_feature 1..20: note = Target: ANGPTL4; (+) strand; PAM type: YTN; PAM sequence: CTG
  source 1..20: mol_type = other DNA
tgttcccatctacttgggag

SEQ ID NO: 18148 - DNA, 20 bp, synthetic construct
  misc_feature 1..20: note = Description of Artificial Sequence: Synthetic oligonucleotide
  misc_feature 1..20: note = Target: ANGPTL4; (+) strand; PAM type: YTN; PAM sequence: TTC
  source 1..20: mol_type = other DNA
ccatctacttgggaggctga

SEQ ID NO: 18149 - DNA, 20 bp, synthetic construct
  misc_feature 1..20: note = Description of Artificial Sequence: Synthetic oligonucleotide
  misc_feature 1..20: note = Target: ANGPTL4; (+) strand; PAM type: YTN; PAM sequence: CTA
  source 1..20: mol_type = other DNA
cttgggaggctgagttggga

SEQ ID NO: 18150 - DNA, 20 bp, synthetic construct
  misc_feature 1..20: note = Description of Artificial Sequence: Synthetic oligonucleotide
  misc_feature 1..20: note = Target: ANGPTL4; (+) strand; PAM type: YTN; PAM sequence: CTT
  source 1..20: mol_type = other DNA
gggaggctgagttgggagga

SEQ ID NO: 18151 - DNA, 20 bp, synthetic construct
  misc_feature 1..20: note = Description of Artificial Sequence: Synthetic oligonucleotide
  misc_feature 1..20: note = Target: ANGPTL4; (+) strand; PAM type: YTN; PAM sequence: TTG
  source 1..20: mol_type = other DNA
ggaggctgagttgggaggat

SEQ ID NO: 18152 - DNA, 20 bp, synthetic construct
  misc_feature 1..20: note = Description of Artificial Sequence: Synthetic oligonucleotide
  misc_feature 1..20: note = Target: ANGPTL4; (+) strand; PAM type: YTN; PAM sequence: CTG
  source 1..20: mol_type = other DNA
agttgggaggatctcttgag

SEQ ID NO: 18153 - DNA, 20 bp, synthetic construct
  misc_feature 1..20: note = Description of Artificial Sequence: Synthetic oligonucleotide
  misc_feature 1..20: note = Target: ANGPTL4; (+) strand; PAM type: YTN; PAM sequence: TTG
  source 1..20: mol_type = other DNA
ggaggatctcttgagcctag

SEQ ID NO: 18154 - DNA, 20 bp, synthetic construct
  misc_feature 1..20: note = Description of Artificial Sequence: Synthetic oligonucleotide
  misc_feature 1..20: note = Target: ANGPTL4; (+) strand; PAM type: YTN; PAM sequence: CTC
  source 1..20: mol_type = other DNA
ttgagcctaggagataaggc

SEQ ID NO: 18155 - DNA, 20 bp, synthetic construct
  misc_feature 1..20: note = Description of Artificial Sequence: Synthetic oligonucleotide
  misc_feature 1..20: note = Target: ANGPTL4; (+) strand; PAM type: YTN; PAM sequence: CTT
  source 1..20: mol_type = other DNA
gagcctaggagataaggctg

SEQ ID NO: 18156 - DNA, 20 bp, synthetic construct
  misc_feature 1..20: note = Description of Artificial Sequence: Synthetic oligonucleotide
  misc_feature 1..20: note = Target: ANGPTL4; (+) strand; PAM type: YTN; PAM sequence: TTG
  source 1..20: mol_type = other DNA
agcctaggagataaggctgc

SEQ ID NO: 18157 - DNA, 20 bp, synthetic construct
  misc_feature 1..20: note = Description of Artificial Sequence: Synthetic oligonucleotide
  misc_feature 1..20: note = Target: ANGPTL4; (+) strand; PAM type: YTN; PAM sequence: CTA
  source 1..20: mol_type = other DNA
ggagataaggctgcagtgag

SEQ ID NO: 18158 - DNA, 20 bp, synthetic construct
  misc_feature 1..20: note = Description of Artificial Sequence: Synthetic oligonucleotide
  misc_feature 1..20: note = Target: ANGPTL4; (+) strand; PAM type: YTN; PAM sequence: CTG
  source 1..20: mol_type = other DNA
cagtgagctgagactgcgcc

SEQ ID NO: 18159 - DNA, 20 bp, synthetic construct
  misc_feature 1..20: note = Description of Artificial Sequence: Synthetic oligonucleotide
  misc_feature 1..20: note = Target: ANGPTL4; (+) strand; PAM type: YTN; PAM sequence: CTG
  source 1..20: mol_type = other DNA
agactgcgccactgcactca

SEQ ID NO: 18160 - DNA, 20 bp, synthetic construct
  misc_feature 1..20: note = Description of Artificial Sequence: Synthetic oligonucleotide
  misc_feature 1..20: note = Target: ANGPTL4; (+) strand; PAM type: YTN; PAM sequence: CTG
  source 1..20: mol_type = other DNA
cgccactgcactcaagcctg

SEQ ID NO: 18161 - DNA, 20 bp, synthetic construct
  misc_feature 1..20: note = Description of Artificial Sequence: Synthetic oligonucleotide
  misc_feature 1..20: note = Target: ANGPTL4; (+) strand; PAM type: YTN; PAM sequence: CTG
  source 1..20: mol_type = other DNA
cactcaagcctgggtgacag

SEQ ID NO: 18162 - DNA, 20 bp, synthetic construct
  misc_feature 1..20: note = Description of Artificial Sequence: Synthetic oligonucleotide
  misc_feature 1..20: note = Target: ANGPTL4; (+) strand; PAM type: YTN; PAM sequence: CTC
  source 1..20: mol_type = other DNA
aagcctgggtgacagagtga

SEQ ID NO: 18163 - DNA, 20 bp, synthetic construct
  misc_feature 1..20: note = Description of Artificial Sequence: Synthetic oligonucleotide
  misc_feature 1..20: note = Target: ANGPTL4; (+) strand; PAM type: YTN; PAM sequence: CTG
  source 1..20: mol_type = other DNA
ggtgacagagtgagacccct

SEQ ID NO: 18164 - DNA, 20 bp, synthetic construct
  misc_feature 1..20: note = Description of Artificial Sequence: Synthetic oligonucleotide
  misc_feature 1..20: note = Target: ANGPTL4; (+) strand; PAM type: YTN; PAM sequence: CTG
  source 1..20: mol_type = other DNA
cctcaaaagaaaaagaaaaa

SEQ ID NO: 18165 - DNA, 20 bp, synthetic construct
  misc_feature 1..20: note = Description of Artificial Sequence: Synthetic oligonucleotide
  misc_feature 1..20: note = Target: ANGPTL4; (+) strand; PAM type: YTN; PAM sequence: CTC
  source 1..20: mol_type = other DNA
aaaagaaaaagaaaaaatgc

SEQ ID NO: 18166 - DNA, 20 bp, synthetic construct
  misc_feature 1..20: note = Description of Artificial Sequence: Synthetic oligonucleotide
  misc_feature 1..20: note = Target: ANGPTL4; (+) strand; PAM type: YTN; PAM sequence: CTC
  source 1..20: mol_type = other DNA
acacctgtggtcccagctac

SEQ ID NO: 18167 - DNA, 20 bp, synthetic construct
  misc_feature 1..20: note = Description of Artificial Sequence: Synthetic oligonucleotide
  misc_feature 1..20: note = Target: ANGPTL4; (+) strand; PAM type: YTN; PAM sequence: CTG
  source 1..20: mol_type = other DNA
tggtcccagctacttgggag

SEQ ID NO: 18168 - DNA, 20 bp, synthetic construct
  misc_feature 1..20: note = Description of Artificial Sequence: Synthetic oligonucleotide
  misc_feature 1..20: note = Target: ANGPTL4; (+) strand; PAM type: YTN; PAM sequence: CTA
  source 1..20: mol_type = other DNA
cttgggaggcccaggtacaa

SEQ ID NO: 18169 - DNA, 20 bp, synthetic construct
  misc_feature 1..20: note = Description of Artificial Sequence: Synthetic oligonucleotide
  misc_feature 1..20: note = Target: ANGPTL4; (+) strand; PAM type: YTN; PAM sequence: CTT
  source 1..20: mol_type = other DNA
gggaggcccaggtacaagaa

SEQ ID NO: 18170 - DNA, 20 bp, synthetic construct
  misc_feature 1..20: note = Description of Artificial Sequence: Synthetic oligonucleotide
  misc_feature 1..20: note = Target: ANGPTL4; (+) strand; PAM type: YTN; PAM sequence: TTG
  source 1..20: mol_type = other DNA
ggaggcccaggtacaagaat

SEQ ID NO: 18171 - DNA, 20 bp, synthetic construct
  misc_feature 1..20: note = Description of Artificial Sequence: Synthetic oligonucleotide
  misc_feature 1..20: note = Target: ANGPTL4; (+) strand; PAM type: YTN; PAM sequence: CTT
  source 1..20: mol_type = other DNA
gagcccgtaaggttgacgct

SEQ ID NO: 18172 - DNA, 20 bp, synthetic construct
  misc_feature 1..20: note = Description of Artificial Sequence: Synthetic oligonucleotide
  misc_feature 1..20: note = Target: ANGPTL4; (+) strand; PAM type: YTN; PAM sequence: TTG
  source 1..20: mol_type = other DNA
agcccgtaaggttgacgctg

SEQ ID NO: 18173 - DNA, 20 bp, synthetic construct
  misc_feature 1..20: note = Description of Artificial Sequence: Synthetic oligonucleotide
  misc_feature 1..20: note = Target: ANGPTL4; (+) strand; PAM type: YTN; PAM sequence: TTG
  source 1..20: mol_type = other DNA
acgctgcattgagccatcac

SEQ ID NO: 18174 - DNA, 20 bp, synthetic construct
  misc_feature 1..20: note = Description of Artificial Sequence: Synthetic oligonucleotide
  misc_feature 1..20: note = Target: ANGPTL4; (+) strand; PAM type: YTN; PAM sequence: CTG
  source 1..20: mol_type = other DNA
cattgagccatcaccacacc

SEQ ID NO: 18175 - DNA, 20 bp, synthetic construct
  misc_feature 1..20: note = Description of Artificial Sequence: Synthetic oligonucleotide
  misc_feature 1..20: note = Target: ANGPTL4; (+) strand; PAM type: YTN; PAM sequence: TTG
  source 1..20: mol_type = other DNA
agccatcaccacaccactgc

SEQ ID NO: 18176 - DNA, 20 bp, synthetic construct
  misc_feature 1..20: note = Description of Artificial Sequence: Synthetic oligonucleotide
  misc_feature 1..20: note = Target: ANGPTL4; (+) strand; PAM type: YTN; PAM sequence: CTG
  source 1..20: mol_type = other DNA
cactccagcctgggcaatgg

SEQ ID NO: 18177 - DNA, 20 bp, synthetic construct
  misc_feature 1..20: note = Description of Artificial Sequence: Synthetic oligonucleotide
  misc_feature 1..20: note = Target: ANGPTL4; (+) strand; PAM type: YTN; PAM sequence: CTC
  source 1..20: mol_type = other DNA
cagcctgggcaatggagcca

SEQ ID NO: 18178 - DNA, 20 bp, synthetic construct
  misc_feature 1..20: note = Description of Artificial Sequence: Synthetic oligonucleotide
  misc_feature 1..20: note = Target: ANGPTL4; (+) strand; PAM type: YTN; PAM sequence: CTG
  source 1..20: mol_type = other DNA
ggcaatggagccaggccctg

SEQ ID NO: 18179 - DNA, 20 bp, synthetic construct
  misc_feature 1..20: note = Description of Artificial Sequence: Synthetic oligonucleotide
  misc_feature 1..20: note = Target: ANGPTL4; (+) strand; PAM type: YTN; PAM sequence: CTG
  source 1..20: mol_type = other DNA
tctcaaaaaaaattgttttt

SEQ ID NO: 18180 - DNA, 20 bp, synthetic construct
  misc_feature 1..20: note = Description of Artificial Sequence: Synthetic oligonucleotide
  misc_feature 1..20: note = Target: ANGPTL4; (+) strand; PAM type: YTN; PAM sequence: CTC
  source 1..20: mol_type = other DNA
aaaaaaaattgtttttaaac

SEQ ID NO: 18181 - DNA, 20 bp, synthetic construct
  misc_feature 1..20: note = Description of Artificial Sequence: Synthetic oligonucleotide
  misc_feature 1..20: note = Target: ANGPTL4; (+) strand; PAM type: YTN; PAM sequence: TTG
  source 1..20: mol_type = other DNA
tttttaaacttaaaaataag

SEQ ID NO: 18182 - DNA, 20 bp, synthetic construct
  misc_feature 1..20: note = Description of Artificial Sequence: Synthetic oligonucleotide
  misc_feature 1..20: note = Target: ANGPTL4; (+) strand; PAM type: YTN; PAM sequence: TTT
  source 1..20: mol_type = other DNA
ttaaacttaaaaataaggcc

SEQ ID NO: 18183 - DNA, 20 bp, synthetic construct
  misc_feature 1..20: note = Description of Artificial Sequence: Synthetic oligonucleotide
  misc_feature 1..20: note = Target: ANGPTL4; (+) strand; PAM type: YTN; PAM sequence: TTT
  source 1..20: mol_type = other DNA
taaacttaaaaataaggccg

SEQ ID NO: 18184 - DNA, 20 bp, synthetic construct
  misc_feature 1..20: note = Description of Artificial Sequence: Synthetic oligonucleotide
  misc_feature 1..20: note = Target: ANGPTL4; (+) strand; PAM type: YTN; PAM sequence: TTT
  source 1..20: mol_type = other DNA
aaacttaaaaataaggccgg

SEQ ID NO: 18185 - DNA, 20 bp, synthetic construct
  misc_feature 1..20: note = Description of Artificial Sequence: Synthetic oligonucleotide
  misc_feature 1..20: note = Target: ANGPTL4; (+) strand; PAM type: YTN; PAM sequence: TTA
  source 1..20: mol_type = other DNA
aacttaaaaataaggccggg

SEQ ID NO: 18186 - DNA, 20 bp, synthetic construct
  misc_feature 1..20: note = Description of Artificial Sequence: Synthetic oligonucleotide
  misc_feature 1..20: note = Target: ANGPTL4; (+) strand; PAM type: YTN; PAM sequence: CTT
  source 1..20: mol_type = other DNA
aaaaataaggccgggtgtgg

SEQ ID NO: 18187 - DNA, 20 bp, synthetic construct
  misc_feature 1..20: note = Description of Artificial Sequence: Synthetic oligonucleotide
  misc_feature 1..20: note = Target: ANGPTL4; (+) strand; PAM type: YTN; PAM sequence: TTA
  source 1..20: mol_type = other DNA
aaaataaggccgggtgtggg

SEQ ID NO: 18188 - DNA, 20 bp, synthetic construct
  misc_feature 1..20: note = Description of Artificial Sequence: Synthetic oligonucleotide
  misc_feature 1..20: note = Target: ANGPTL4; (+) strand; PAM type: YTN; PAM sequence: CTC
  source 1..20: mol_type = other DNA
acacctgtaatcccagcact

SEQ ID NO: 18189 - DNA, 20 bp, synthetic construct
  misc_feature 1..20: note = Description of Artificial Sequence: Synthetic oligonucleotide
  misc_feature 1..20: note = Target: ANGPTL4; (+) strand; PAM type: YTN; PAM sequence: CTG
  source 1..20: mol_type = other DNA
taatcccagcactttgggag

SEQ ID NO: 18190 - DNA, 20 bp, synthetic construct
  misc_feature 1..20: note = Description of Artificial Sequence: Synthetic oligonucleotide
  misc_feature 1..20: note = Target: ANGPTL4; (+) strand; PAM type: YTN; PAM sequence: CTT
  source 1..20: mol_type = other DNA
tgggaggccgaggtgggtgg

SEQ ID NO: 18191 - DNA, 20 bp, synthetic construct
  misc_feature 1..20: note = Description of Artificial Sequence: Synthetic oligonucleotide
  misc_feature 1..20: note = Target: ANGPTL4; (+) strand; PAM type: YTN; PAM sequence: TTT
  source 1..20: mol_type = other DNA
gggaggccgaggtgggtgga

SEQ ID NO: 18192 - DNA, 20 bp, synthetic construct
  misc_feature 1..20: note = Description of Artificial Sequence: Synthetic oligonucleotide
  misc_feature 1..20: note = Target: ANGPTL4; (+) strand; PAM type: YTN; PAM sequence: TTG
  source 1..20: mol_type = other DNA
ggaggccgaggtgggtggat

SEQ ID NO: 18193 - DNA, 20 bp, synthetic construct
  misc_feature 1..20: note = Description of Artificial Sequence: Synthetic oligonucleotide
  misc_feature 1..20: note = Target: ANGPTL4; (+) strand; PAM type: YTN; PAM sequence: CTG
  source 1..20: mol_type = other DNA
aggtcaggagttcaaaacta

SEQ ID NO: 18194 - DNA, 20 bp, synthetic construct
  misc_feature 1..20: note = Description of Artificial Sequence: Synthetic oligonucleotide
  misc_feature 1..20: note = Target: ANGPTL4; (+) strand; PAM type: YTN; PAM sequence: TTC
  source 1..20: mol_type = other DNA
aaaactagcctggccaacat

SEQ ID NO: 18195 - DNA, 20 bp, synthetic construct
  misc_feature 1..20: note = Description of Artificial Sequence: Synthetic oligonucleotide
  misc_feature 1..20: note = Target: ANGPTL4; (+) strand; PAM type: YTN; PAM sequence: CTA
  source 1..20: mol_type = other DNA
gcctggccaacatggtgaaa

SEQ ID NO: 18196 - DNA, 20 bp, synthetic construct
  misc_feature 1..20: note = Description of Artificial Sequence: Synthetic oligonucleotide
  misc_feature 1..20: note = Target: ANGPTL4; (+) strand; PAM type: YTN; PAM sequence: CTG
  source 1..20: mol_type = other DNA
gccaacatggtgaaaccctg

SEQ ID NO: 18197 - DNA, 20 bp, synthetic construct
  misc_feature 1..20: note = Description of Artificial Sequence: Synthetic oligonucleotide
  misc_feature 1..20: note = Target: ANGPTL4; (+) strand; PAM type: YTN; PAM sequence: CTG
  source 1..20: mol_type = other DNA
tctctactaaaaatacaaaa

SEQ ID NO: 18198 - DNA, 20 bp, synthetic construct
  misc_feature 1..20: note = Description of Artificial Sequence: Synthetic oligonucleotide
  misc_feature 1..20: note = Target: ANGPTL4; (+) strand; PAM type: YTN; PAM sequence: CTC
  source 1..20: mol_type = other DNA
tactaaaaatacaaaaatta

SEQ ID NO: 18199 - DNA, 20 bp, synthetic construct
  misc_feature 1..20: note = Description of Artificial Sequence: Synthetic oligonucleotide
  misc_feature 1..20: note = Target: ANGPTL4; (+) strand; PAM type: YTN; PAM sequence: CTA
  source 1..20: mol_type = other DNA
ctaaaaatacaaaaattagg

SEQ ID NO: 18200 - DNA, 20 bp, synthetic construct
  misc_feature 1..20: note = Description of Artificial Sequence: Synthetic oligonucleotide
  misc_feature 1..20: note = Target: ANGPTL4; (+) strand; PAM type: YTN; PAM sequence: CTA
  source 1..20: mol_type = other DNA
aaaatacaaaaattaggcca

SEQ ID NO: 18201 - DNA, 20 bp, synthetic construct
  misc_feature 1..20: note = Description of Artificial Sequence: Synthetic oligonucleotide
  misc_feature 1..20: note = Target: ANGPTL4; (+) strand; PAM type: YTN; PAM sequence: TTA
  source 1..20: mol_type = other DNA
ggccaggcgcagtgggtcat

SEQ ID NO: 18202 - DNA, 20 bp, synthetic construct
  misc_feature 1..20: note = Description of Artificial Sequence: Synthetic oligonucleotide
  misc_feature 1..20: note = Target: ANGPTL4; (+) strand; PAM type: YTN; PAM sequence: CTG
  source 1..20: mol_type = other DNA
taatcccagcactttgggag

SEQ ID NO: 18203 - DNA, 20 bp, synthetic construct
  misc_feature 1..20: note = Description of Artificial Sequence: Synthetic oligonucleotide
  misc_feature 1..20: note = Target: ANGPTL4; (+) strand; PAM type: YTN; PAM sequence: CTT
  source 1..20: mol_type = other DNA
tgggaggctgaggagggtgg

SEQ ID NO: 18204 - DNA, 20 bp, synthetic construct
  misc_feature 1..20: note = Description of Artificial Sequence: Synthetic oligonucleotide
  misc_feature 1..20: note = Target: ANGPTL4; (+) strand; PAM type: YTN; PAM sequence: TTT
  source 1..20: mol_type = other DNA
gggaggctgaggagggtgga

SEQ ID NO: 18205 - DNA, 20 bp, synthetic construct
  misc_feature 1..20: note = Description of Artificial Sequence: Synthetic oligonucleotide
  misc_feature 1..20: note = Target: ANGPTL4; (+) strand; PAM type: YTN; PAM sequence: TTG
  source 1..20: mol_type = other DNA
ggaggctgaggagggtggat

SEQ ID NO: 18206 - DNA, 20 bp, synthetic construct
  misc_feature 1..20: note = Description of Artificial Sequence: Synthetic oligonucleotide
  misc_feature 1..20: note = Target: ANGPTL4; (+) strand; PAM type: YTN; PAM sequence: CTG
  source 1..20: mol_type = other DNA
aggagggtggatcacatgag

SEQ ID NO: 18207 - DNA, 20 bp, synthetic construct
  misc_feature 1..20: note = Description of Artificial Sequence: Synthetic oligonucleotide
  misc_feature 1..20: note = Target: ANGPTL4; (+) strand; PAM type: YTN; PAM sequence: TTT
  source 1..20: mol_type = other DNA
gagaccaacctggccaacat

SEQ ID NO: 18208 - DNA, 20 bp, synthetic construct
  misc_feature 1..20: note = Description of Artificial Sequence: Synthetic oligonucleotide
  misc_feature 1..20: note = Target: ANGPTL4; (+) strand; PAM type: YTN; PAM sequence: TTG
  source 1..20: mol_type = other DNA
agaccaacctggccaacatg

SEQ ID NO: 18209 - DNA, 20 bp, synthetic construct
  misc_feature 1..20: note = Description of Artificial Sequence: Synthetic oligonucleotide
  misc_feature 1..20: note = Target: ANGPTL4; (+) strand; PAM type: YTN; PAM sequence: CTG
  source 1..20: mol_type = other DNA
gccaacatggtgaaaccccc

SEQ ID NO: 18210 - DNA, 20 bp, synthetic construct
  misc_feature 1..20: note = Description of Artificial Sequence: Synthetic oligonucleotide
  misc_feature 1..20: note = Target: ANGPTL4; (+) strand; PAM type: YTN; PAM sequence: CTC
  source 1..20: mol_type = other DNA
actactaaaaatacaaaaac

SEQ ID NO: 18211 - DNA, 20 bp, synthetic construct
  misc_feature 1..20: note = Description of Artificial Sequence: Synthetic oligonucleotide
  misc_feature 1..20: note = Target: ANGPTL4; (+) strand; PAM type: YTN; PAM sequence: CTA
  source 1..20: mol_type = other DNA
ctaaaaatacaaaaactagc

SEQ ID NO: 18212 - DNA, 20 bp, synthetic construct
  misc_feature 1..20: note = Description of Artificial Sequence: Synthetic oligonucleotide
  misc_feature 1..20: note = Target: ANGPTL4; (+) strand; PAM type: YTN; PAM sequence: CTA
  source 1..20: mol_type = other DNA
aaaatacaaaaactagccag

SEQ ID NO: 18213 - DNA, 20 bp, synthetic construct
  misc_feature 1..20: note = Description of Artificial Sequence: Synthetic oligonucleotide
  misc_feature 1..20: note = Target: ANGPTL4; (+) strand; PAM type: YTN; PAM sequence: CTA
  source 1..20: mol_type = other DNA
gccaggcgtggtggcgggtg

SEQ ID NO: 18214 - DNA, 20 bp, synthetic construct
  misc_feature 1..20: note = Description of Artificial Sequence: Synthetic oligonucleotide
  misc_feature 1..20: note = Target: ANGPTL4; (+) strand; PAM type: YTN; PAM sequence: CTG
  source 1..20: mol_type = other DNA
taatcccggctactcaggag

SEQ ID NO: 18215 - DNA, 20 bp, synthetic construct
  misc_feature 1..20: note = Description of Artificial Sequence: Synthetic oligonucleotide
  misc_feature 1..20: note = Target: ANGPTL4; (+) strand; PAM type: YTN; PAM sequence: CTA
  source 1..20: mol_type = other DNA
ctcaggaggctgaggcatga

SEQ ID NO: 18216 - DNA, 20 bp, synthetic construct
  misc_feature 1..20: note = Description of Artificial Sequence: Synthetic oligonucleotide
  misc_feature 1..20: note = Target: ANGPTL4; (+) strand; PAM type: YTN; PAM sequence: CTC
  source 1..20: mol_type = other DNA
aggaggctgaggcatgagaa

SEQ ID NO: 18217 - DNA, 20 bp, synthetic construct
  misc_feature 1..20: note = Description of Artificial Sequence: Synthetic oligonucleotide
  misc_feature 1..20: note = Target: ANGPTL4; (+) strand; PAM type: YTN; PAM sequence: CTG
  source 1..20: mol_type = other DNA
aggcatgagaatcccttgaa

SEQ ID NO: 18218 - DNA, 20 bp, synthetic construct
  misc_feature 1..20: note = Description of Artificial Sequence: Synthetic oligonucleotide
  misc_feature 1..20: note = Target: ANGPTL4; (+) strand; PAM type: YTN; PAM sequence: CTT
  source 1..20: mol_type = other DNA
gaacctgggaggcagaggtg

SEQ ID NO: 18219 - DNA, 20 bp, synthetic construct
  misc_feature 1..20: note = Description of Artificial Sequence: Synthetic oligonucleotide
  misc_feature 1..20: note = Target: ANGPTL4; (+) strand; PAM type: YTN; PAM sequence: TTG
  source 1..20: mol_type = other DNA
aacctgggaggcagaggtgc

SEQ ID NO: 18220 - DNA, 20 bp, synthetic construct
  misc_feature 1..20: note = Description of Artificial Sequence: Synthetic oligonucleotide
  misc_feature 1..20: note = Target: ANGPTL4; (+) strand; PAM type: YTN; PAM sequence: CTG
  source 1..20: mol_type = other DNA
ggaggcagaggtgcagtgag

SEQ ID NO: 18221 - DNA, 20 bp, synthetic construct
  misc_feature 1..20: note = Description of Artificial Sequence: Synthetic oligonucleotide
  misc_feature 1..20: note = Target: ANGPTL4; (+) strand; PAM type: YTN; PAM sequence: TTG
  source 1..20: mol_type = other DNA
tgccactgcactccagcctg

SEQ ID NO: 18222 - DNA, 20 bp, synthetic construct
  misc_feature 1..20: note = Description of Artificial Sequence: Synthetic oligonucleotide
  misc_feature 1..20: note = Target: ANGPTL4; (+) strand; PAM type: YTN; PAM sequence: CTG
  source 1..20: mol_type = other DNA
cactccagcctgggagatag

SEQ ID NO: 18223 - DNA, 20 bp, synthetic construct
  misc_feature 1..20: note = Description of Artificial Sequence: Synthetic oligonucleotide
  misc_feature 1..20: note = Target: ANGPTL4; (+) strand; PAM type: YTN; PAM sequence: CTC
  source 1..20: mol_type = other DNA
cagcctgggagatagagtga

SEQ ID NO: 18224 - DNA, 20 bp, synthetic construct
  misc_feature 1..20: note = Description of Artificial Sequence: Synthetic oligonucleotide
  misc_feature 1..20: note = Target: ANGPTL4; (+) strand; PAM type: YTN; PAM sequence: CTG
  source 1..20: mol_type = other DNA
ggagatagagtgagactcag

SEQ ID NO: 18225 - DNA, 20 bp, synthetic construct
  misc_feature 1..20: note = Description of Artificial Sequence: Synthetic oligonucleotide
  misc_feature 1..20: note = Target: ANGPTL4; (+) strand; PAM type: YTN; PAM sequence: CTC
  source 1..20: mol_type = other DNA
agtctcaaaaaaaaagacca

SEQ ID NO: 18226 - DNA, 20 bp, synthetic construct
  misc_feature 1..20: note = Description of Artificial Sequence: Synthetic oligonucleotide
  misc_feature 1..20: note = Target: ANGPTL4; (+) strand; PAM type: YTN; PAM sequence: CTC
  source 1..20: mol_type = other DNA
aaaaaaaaagaccaaaaatt

SEQ ID NO: 18227 - DNA, 20 bp, synthetic construct
  misc_feature 1..20: note = Description of Artificial Sequence: Synthetic oligonucleotide
  misc_feature 1..20: note = Target: ANGPTL4; (+) strand; PAM type: YTN; PAM sequence: TTA
  source 1..20: mol_type = other DNA
gccaggtgtggtggcaggcg

SEQ ID NO: 18228 - DNA, 20 bp, synthetic construct
  misc_feature 1..20: note = Description of Artificial Sequence: Synthetic oligonucleotide
  misc_feature 1..20: note = Target: ANGPTL4; (+) strand; PAM type: YTN; PAM sequence: CTG
  source 1..20: mol_type = other DNA
taatcccagctactcgggag

SEQ ID NO: 18229 - DNA, 20 bp, synthetic construct
  misc_feature 1..20: note = Description of Artificial Sequence: Synthetic oligonucleotide
  misc_feature 1..20: note = Target: ANGPTL4; (+) strand; PAM type: YTN; PAM sequence: CTA
  source 1..20: mol_type = other DNA
ctcgggaggctgagggagga

SEQ ID NO: 18230 - DNA, 20 bp, synthetic construct
  misc_feature 1..20: note = Description of Artificial Sequence: Synthetic oligonucleotide
  misc_feature 1..20: note = Target: ANGPTL4; (+) strand; PAM type: YTN; PAM sequence: CTC
  source 1..20: mol_type = other DNA
gggaggctgagggaggagaa

SEQ ID NO: 18231 - DNA, 20 bp, synthetic construct
  misc_feature 1..20: note = Description of Artificial Sequence: Synthetic oligonucleotide
  misc_feature 1..20: note = Target: ANGPTL4; (+) strand; PAM type: YTN; PAM sequence: CTG
  source 1..20: mol_type = other DNA
agggaggagaatcacttaaa

SEQ ID NO: 18232 - DNA, 20 bp, synthetic construct
  misc_feature 1..20: note = Description of Artificial Sequence: Synthetic oligonucleotide
  misc_feature 1..20: note = Target: ANGPTL4; (+) strand; PAM type: YTN; PAM sequence: CTT
  source 1..20: mol_type = other DNA
aaacctgagagacggaggtt

SEQ ID NO: 18233 - DNA, 20 bp, synthetic construct
  misc_feature 1..20: note = Description of Artificial Sequence: Synthetic oligonucleotide
  misc_feature 1..20: note = Target: ANGPTL4; (+) strand; PAM type: YTN; PAM sequence: TTA
  source 1..20: mol_type = other DNA
aacctgagagacggaggttg

SEQ ID NO: 18234 - DNA, 20 bp, synthetic construct
  misc_feature 1..20: note = Description of Artificial Sequence: Synthetic oligonucleotide
  misc_feature 1..20: note = Target: ANGPTL4; (+) strand; PAM type: YTN; PAM sequence: CTG
  source 1..20: mol_type = other DNA
agagacggaggttgcagtga

SEQ ID NO: 18235 - DNA, 20 bp, synthetic construct
  misc_feature 1..20: note = Description of Artificial Sequence: Synthetic oligonucleotide
  misc_feature 1..20: note = Target: ANGPTL4; (+) strand; PAM type: YTN; PAM sequence: TTG
  source 1..20: mol_type = other DNA
cagtgagctgagatcgcacc

SEQ ID NO: 18236 - DNA, 20 bp, synthetic construct
  misc_feature 1..20: note = Description of Artificial Sequence: Synthetic oligonucleotide
  misc_feature 1..20: note = Target: ANGPTL4; (+) strand; PAM type: YTN; PAM sequence: CTG
  source 1..20: mol_type = other DNA
agatcgcaccactgcactcc

SEQ ID NO: 18237 - DNA, 20 bp, synthetic construct
  misc_feature 1..20: note = Description of Artificial Sequence: Synthetic oligonucleotide
  misc_feature 1..20: note = Target: ANGPTL4; (+) strand; PAM type: YTN; PAM sequence: CTG
  source 1..20: mol_type = other DNA
cactccagcctgggtgacag

SEQ ID NO: 18238 - DNA, 20 bp, synthetic construct
  misc_feature 1..20: note = Description of Artificial Sequence: Synthetic oligonucleotide
  misc_feature 1..20: note = Target: ANGPTL4; (+) strand; PAM type: YTN; PAM sequence: CTC
  source 1..20: mol_type = other DNA
cagcctgggtgacagagtaa

SEQ ID NO: 18239 - DNA, 20 bp, synthetic construct
  misc_feature 1..20: note = Description of Artificial Sequence: Synthetic oligonucleotide
  misc_feature 1..20: note = Target: ANGPTL4; (+) strand; PAM type: YTN; PAM sequence: CTG
  source 1..20: mol_type = other DNA
ggtgacagagtaagactcaa

SEQ ID NO: 18240 - DNA, 20 bp, synthetic construct
  misc_feature 1..20: note = Description of Artificial Sequence: Synthetic oligonucleotide
  misc_feature 1..20: note = Target: ANGPTL4; (+) strand; PAM type: YTN; PAM sequence: CTC
  source 1..20: mol_type = other DNA
aatctcaaaaaaaaaaaagt

SEQ ID NO: 18241 - DNA, 20 bp, synthetic construct
  misc_feature 1..20: note = Description of Artificial Sequence: Synthetic oligonucleotide
  misc_feature 1..20: note = Target: ANGPTL4; (+) strand; PAM type: YTN; PAM sequence: CTC
  source 1..20: mol_type = other DNA
aaaaaaaaaaaagtcaagtc

SEQ ID NO: 18242 - DNA, 20 bp, synthetic construct
  misc_feature 1..20: note = Description of Artificial Sequence: Synthetic oligonucleotide
  misc_feature 1..20: note = Target: ANGPTL4; (+) strand; PAM type: YTN; PAM sequence: CTG
  source 1..20: mol_type = other DNA
gtccccaacctgcctcatcc

SEQ ID NO: 18243 - DNA, 20 bp, synthetic construct
  misc_feature 1..20: note = Description of Artificial Sequence: Synthetic oligonucleotide
  misc_feature 1..20: note = Target: ANGPTL4; (+) strand; PAM type: YTN; PAM sequence: CTG
  source 1..20: mol_type = other DNA
cctcatcctcaaccctatcc

SEQ ID NO: 18244 - DNA, 20 bp, synthetic construct
  misc_feature 1..20: note = Description of Artificial Sequence: Synthetic oligonucleotide
  misc_feature 1..20: note = Target: ANGPTL4; (+) strand; PAM type: YTN; PAM sequence: CTC
  source 1..20: mol_type = other DNA
atcctcaaccctatccctat

SEQ ID NO: 18245 - DNA, 20 bp, synthetic construct
  misc_feature 1..20: note = Description of Artificial Sequence: Synthetic oligonucleotide
  misc_feature 1..20: note = Target: ANGPTL4; (+) strand; PAM type: YTN; PAM sequence: CTC
  source 1..20: mol_type = other DNA
aaccctatccctatctcctt

SEQ ID NO: 18246 - DNA, 20 bp, synthetic construct
  misc_feature 1..20: note = Description of Artificial Sequence: Synthetic oligonucleotide
  misc_feature 1..20: note = Target: ANGPTL4; (+) strand; PAM type: YTN; PAM sequence: CTA
  source 1..20: mol_type = other DNA
tccctatctcctttcagccc

SEQ ID NO: 18247 - DNA, 20 bp, synthetic construct
  misc_feature 1..20: note = Description of Artificial Sequence: Synthetic oligonucleotide
  misc_feature 1..20: note = Target: ANGPTL4; (+) strand; PAM type: YTN; PAM sequence: CTA
  source 1..20: mol_type = other DNA
tctcctttcagccccatcgg

SEQ ID NO: 18248 - DNA, 20 bp, synthetic construct
  misc_feature 1..20: note = Description of Artificial Sequence: Synthetic oligonucleotide
  misc_feature 1..20: note = Target: ANGPTL4; (+) strand; PAM type: YTN; PAM sequence: CTC
  source 1..20: mol_type = other DNA
ctttcagccccatcggtggc

SEQ ID NO: 18249 - DNA, 20 bp, synthetic construct
  misc_feature 1..20: note = Description of Artificial Sequence: Synthetic oligonucleotide
  misc_feature 1..20: note = Target: ANGPTL4; (+) strand; PAM type: YTN; PAM sequence: CTT
  source 1..20: mol_type = other DNA
tcagccccatcggtggctca

SEQ ID NO: 18250 - DNA, 20 bp, synthetic construct
  misc_feature 1..20: note = Description of Artificial Sequence: Synthetic oligonucleotide
  misc_feature 1..20: note = Target: ANGPTL4; (+) strand; PAM type: YTN; PAM sequence: TTT
  source 1..20: mol_type = other DNA
cagccccatcggtggctcaa

SEQ ID NO: 18251 - DNA, 20 bp, synthetic construct
  misc_feature 1..20: note = Description of Artificial Sequence: Synthetic oligonucleotide
  misc_feature 1..20: note = Target: ANGPTL4; (+) strand; PAM type: YTN; PAM sequence: TTC
  source 1..20: mol_type = other DNA
agccccatcggtggctcaaa

SEQ ID NO: 18252 - DNA, 20 bp, synthetic construct
  misc_feature 1..20: note = Description of Artificial Sequence: Synthetic oligonucleotide
  misc_feature 1..20: note = Target: ANGPTL4; (+) strand; PAM type: YTN; PAM sequence: CTC
  source 1..20: mol_type = other DNA
aaagacctgaccatgttccc

SEQ ID NO: 18253 - DNA, 20 bp, synthetic construct
  misc_feature 1..20: note = Description of Artificial Sequence: Synthetic oligonucleotide
  misc_feature 1..20: note = Target: ANGPTL4; (+) strand; PAM type: YTN; PAM sequence: CTG
  source 1..20: mol_type = other DNA
accatgttccctctcccctg

SEQ ID NO: 18254 - DNA, 20 bp, synthetic construct
  misc_feature 1..20: note = Description of Artificial Sequence: Synthetic oligonucleotide
  misc_feature 1..20: note = Target: ANGPTL4; (+) strand; PAM type: YTN; PAM sequence: TTC
  source 1..20: mol_type = other DNA
cctctcccctgaccccggca

SEQ ID NO: 18255 - DNA, 20 bp, synthetic construct
  misc_feature 1..20: note = Description of Artificial Sequence: Synthetic oligonucleotide
  misc_feature 1..20: note = Target: ANGPTL4; (+) strand; PAM type: YTN; PAM sequence: CTC
  source 1..20: mol_type = other DNA
tcccctgaccccggcaggag

SEQ ID NO: 18256 - DNA, 20 bp, synthetic construct
  misc_feature 1..20: note = Description of Artificial Sequence: Synthetic oligonucleotide
  misc_feature 1..20: note = Target: ANGPTL4; (+) strand; PAM type: YTN; PAM sequence: CTC
  source 1..20: mol_type = other DNA
ccctgaccccggcaggaggc

SEQ ID NO: 18257 - DNA, 20 bp, synthetic construct
  misc_feature 1..20: note = Description of Artificial Sequence: Synthetic oligonucleotide
  misc_feature 1..20: note = Target: ANGPTL4; (+) strand; PAM type: YTN; PAM sequence: CTG
  source 1..20: mol_type = other DNA
accccggcaggaggctggtg

SEQ ID NO: 18258 - DNA, 20 bp, synthetic construct
  misc_feature 1..20: note = Description of Artificial Sequence: Synthetic oligonucleotide
  misc_feature 1..20: note = Target: ANGPTL4; (+) strand; PAM type: YTN; PAM sequence: CTG
  source 1..20: mol_type = other DNA
gtggtttggcacctgcagcc

SEQ ID NO: 18259 - DNA, 20 bp, synthetic construct
  misc_feature 1..20: note = Description of Artificial Sequence: Synthetic oligonucleotide
  misc_feature 1..20: note = Target: ANGPTL4; (+) strand; PAM type: YTN; PAM sequence: TTT
  source 1..20: mol_type = other DNA
ggcacctgcagccattccaa

SEQ ID NO: 18260 - DNA, 20 bp, synthetic construct
  misc_feature 1..20: note = Description of Artificial Sequence: Synthetic oligonucleotide
  misc_feature 1..20: note = Target: ANGPTL4; (+) strand; PAM type: YTN; PAM sequence: TTG
  source 1..20: mol_type = other DNA
gcacctgcagccattccaac

SEQ ID NO: 18261 - DNA, 20 bp, synthetic construct
  misc_feature 1..20: note = Description of Artificial Sequence: Synthetic oligonucleotide
  misc_feature 1..20: note = Target: ANGPTL4; (+) strand; PAM type: YTN; PAM sequence: CTG
  source 1..20: mol_type = other DNA
cagccattccaacctcaacg

SEQ ID NO: 18262 - DNA, 20 bp, synthetic construct
  misc_feature 1..20: note = Description of Artificial Sequence: Synthetic oligonucleotide
  misc_feature 1..20: note = Target: ANGPTL4; (+) strand; PAM type: YTN; PAM sequence: TTC
  source 1..20: mol_type = other DNA
caacctcaacggccagtact

SEQ ID NO: 18263 - DNA, 20 bp, synthetic construct
  misc_feature 1..20: note = Description of Artificial Sequence: Synthetic oligonucleotide
  misc_feature 1..20: note = Target: ANGPTL4; (+) strand; PAM type: YTN; PAM sequence: CTC
  source 1..20: mol_type = other DNA
aacggccagtacttccgctc

SEQ ID NO: 18264 - DNA, 20 bp, synthetic construct
  misc_feature 1..20: note = Description of Artificial Sequence: Synthetic oligonucleotide
  misc_feature 1..20: note = Target: ANGPTL4; (+) strand; PAM type: YTN; PAM sequence: CTT
  source 1..20: mol_type = other DNA
ccgctccatcccacagcagc

SEQ ID NO: 18265 - DNA, 20 bp, synthetic construct
  misc_feature 1..20: note = Description of Artificial Sequence: Synthetic oligonucleotide
  misc_feature 1..20: note = Target: ANGPTL4; (+) strand; PAM type: YTN; PAM sequence: TTC
  source 1..20: mol_type = other DNA
cgctccatcccacagcagcg

SEQ ID NO: 18266 - DNA, 20 bp, synthetic construct
  misc_feature 1..20: note = Description of Artificial Sequence: Synthetic oligonucleotide
  misc_feature 1..20: note = Target: ANGPTL4; (+) strand; PAM type: YTN; PAM sequence: CTC
  source 1..20: mol_type = other DNA
catcccacagcagcggcaga

SEQ ID NO: 18267 - DNA, 20 bp, synthetic construct
  misc_feature 1..20: note = Description of Artificial Sequence: Synthetic oligonucleotide
  misc_feature 1..20: note = Target: ANGPTL4; (+) strand; PAM type: YTN; PAM sequence: CTT
  source 1..20: mol_type = other DNA
aagaagggaatcttctggaa

SEQ ID NO: 18268 - DNA, 20 bp, synthetic construct
  misc_feature 1..20: note = Description of Artificial Sequence: Synthetic oligonucleotide
  misc_feature 1..20: note = Target: ANGPTL4; (+) strand; PAM type: YTN; PAM sequence: TTA
  source 1..20: mol_type = other DNA
agaagggaatcttctggaag

SEQ ID NO: 18269 - DNA, 20 bp, synthetic construct
  misc_feature 1..20: note = Description of Artificial Sequence: Synthetic oligonucleotide
  misc_feature 1..20: note = Target: ANGPTL4; (+) strand; PAM type: YTN; PAM sequence: CTT
  source 1..20: mol_type = other DNA
ctggaagacctggcggggcc

SEQ ID NO: 18270 - DNA, 20 bp, synthetic construct
  misc_feature 1..20: note = Description of Artificial Sequence: Synthetic oligonucleotide
  misc_feature 1..20: note = Target: ANGPTL4; (+) strand; PAM type: YTN; PAM sequence: TTC
  source 1..20: mol_type = other DNA
tggaagacctggcggggccg

SEQ ID NO: 18271 - DNA, 20 bp, synthetic construct
  misc_feature 1..20: note = Description of Artificial Sequence: Synthetic oligonucleotide
  misc_feature 1..20: note = Target: ANGPTL4; (+) strand; PAM type: YTN; PAM sequence: CTG
  source 1..20: mol_type = other DNA
gaagacctggcggggccgct

SEQ ID NO: 18272 - DNA, 20 bp, synthetic construct
  misc_feature 1..20: note = Description of Artificial Sequence: Synthetic oligonucleotide
  misc_feature 1..20: note = Target: ANGPTL4; (+) strand; PAM type: YTN; PAM sequence: CTG
  source 1..20: mol_type = other DNA
gcggggccgctactacccgc

SEQ ID NO: 18273 - DNA, 20 bp, synthetic construct
  misc_feature 1..20: note = Description of Artificial Sequence: Synthetic oligonucleotide
  misc_feature 1..20: note = Target: ANGPTL4; (+) strand; PAM type: YTN; PAM sequence: CTA
  source 1..20: mol_type = other DNA
ctacccgctgcaggccacca

SEQ ID NO: 18274 - DNA, 20 bp, synthetic construct
  misc_feature 1..20: note = Description of Artificial Sequence: Synthetic oligonucleotide
  misc_feature 1..20: note = Target: ANGPTL4; (+) strand; PAM type: YTN; PAM sequence: CTA
  source 1..20: mol_type = other DNA
cccgctgcaggccaccacca

SEQ ID NO: 18275 - DNA, 20 bp, synthetic construct
  misc_feature 1..20: note = Description of Artificial Sequence: Synthetic oligonucleotide
  misc_feature 1..20: note = Target: ANGPTL4; (+) strand; PAM type: YTN; PAM sequence: CTG
  source 1..20: mol_type = other DNA
caggccaccaccatgttgat

SEQ ID NO: 18276 - DNA, 20 bp, synthetic construct
  misc_feature 1..20: note = Description of Artificial Sequence: Synthetic oligonucleotide
  misc_feature 1..20: note = Target: ANGPTL4; (+) strand; PAM type: YTN; PAM sequence: TTG
  source 1..20: mol_type = other DNA
atccagcccatggcagcaga

SEQ ID NO: 18277 - DNA, 20 bp, synthetic construct
  misc_feature 1..20: note = Description of Artificial Sequence: Synthetic oligonucleotide
  misc_feature 1..20: note = Target: ANGPTL4; (+) strand; PAM type: YTN; PAM sequence: CTC
  source 1..20: mol_type = other DNA
ctagcgtcctggctgggcct

SEQ ID NO: 18278 - DNA, 20 bp, synthetic construct
  misc_feature 1..20: note = Description of Artificial Sequence: Synthetic oligonucleotide
  misc_feature 1..20: note = Target: ANGPTL4; (+) strand; PAM type: YTN; PAM sequence: CTA
  source 1..20: mol_type = other DNA
gcgtcctggctgggcctggt

SEQ ID NO: 18279 - DNA, 20 bp, synthetic construct
  misc_feature 1..20: note = Description of Artificial Sequence: Synthetic oligonucleotide
  misc_feature 1..20: note = Target: ANGPTL4; (+) strand; PAM type: YTN; PAM sequence: CTG
  source 1..20: mol_type = other DNA
gctgggcctggtcccaggcc

SEQ ID NO: 18280 - DNA, 20 bp, synthetic construct
  misc_feature 1..20: note = Description of Artificial Sequence: Synthetic oligonucleotide
  misc_feature 1..20: note = Target: ANGPTL4; (+) strand; PAM type: YTN; PAM sequence: CTG
  source 1..20: mol_type = other DNA
ggcctggtcccaggcccacg

SEQ ID NO: 18281 - DNA, 20 bp, synthetic construct
  misc_feature 1..20: note = Description of Artificial Sequence: Synthetic oligonucleotide
  misc_feature 1..20: note = Target: ANGPTL4; (+) strand; PAM type: YTN; PAM sequence: CTG
  source 1..20: mol_type = other DNA
gtcccaggcccacgaaagac

SEQ ID NO: 18282 - DNA, 20 bp, synthetic construct
  misc_feature 1..20: note = Description of Artificial Sequence: Synthetic oligonucleotide
  misc_feature 1..20: note = Target: ANGPTL4; (+) strand; PAM type: YTN; PAM sequence: CTC
  source 1..20: mol_type = other DNA
ttggctctgcccgaggatgt

SEQ ID NO: 18283 - DNA, 20 bp, synthetic construct
  misc_feature 1..20: note = Description of Artificial Sequence: Synthetic oligonucleotide
  misc_feature 1..20: note = Target: ANGPTL4; (+) strand; PAM type: YTN; PAM sequence: CTT
  source 1..20: mol_type = other DNA
ggctctgcccgaggatgtgg

SEQ ID NO: 18284 - DNA, 20 bp, synthetic construct
  misc_feature 1..20: note = Description of Artificial Sequence: Synthetic oligonucleotide
  misc_feature 1..20: note = Target: ANGPTL4; (+) strand; PAM type: YTN; PAM sequence: TTG
  source 1..20: mol_type = other DNA
gctctgcccgaggatgtggc

SEQ ID NO: 18285 - DNA, 20 bp, synthetic construct
  misc_feature 1..20: note = Description of Artificial Sequence: Synthetic oligonucleotide
  misc_feature 1..20: note = Target: ANGPTL4; (+) strand; PAM type: YTN; PAM sequence: CTC
  source 1..20: mol_type = other DNA
tgcccgaggatgtggccgtt

SEQ ID NO: 18286 - DNA, 20 bp, synthetic construct
  misc_feature 1..20: note = Description of Artificial Sequence: Synthetic oligonucleotide
  misc_feature 1..20: note = Target: ANGPTL4; (+) strand; PAM type: YTN; PAM sequence: CTG
  source 1..20: mol_type = other DNA
cccgaggatgtggccgttcc

SEQ ID NO: 18287 - DNA, 20 bp, synthetic construct
  misc_feature 1..20: note = Description of Artificial Sequence: Synthetic oligonucleotide
  misc_feature 1..20: note = Target: ANGPTL4; (+) strand; PAM type: YTN; PAM sequence: TTC
  source 1..20: mol_type = other DNA
cctgcctgggcaggggctcc

SEQ ID NO: 18288 - DNA, 20 bp, synthetic construct
  misc_feature 1..20: note = Description of Artificial Sequence: Synthetic oligonucleotide
  misc_feature 1..20: note = Target: ANGPTL4; (+) strand; PAM type: YTN; PAM sequence: CTG
  source 1..20: mol_type = other DNA
cctgggcaggggctccaagg

SEQ ID NO: 18289 - DNA, 20 bp, synthetic construct
  misc_feature 1..20: note = Description of Artificial Sequence: Synthetic oligonucleotide
  misc_feature 1..20: note = Target: ANGPTL4; (+) strand; PAM type: YTN; PAM sequence: CTG
  source 1..20: mol_type = other DNA
ggcaggggctccaaggaggg

SEQ ID NO: 18290 - DNA, 20 bp, synthetic construct
  misc_feature 1..20: note = Description of Artificial Sequence: Synthetic oligonucleotide
  misc_feature 1..20: note = Target: ANGPTL4; (+) strand; PAM type: YTN; PAM sequence: CTC
  source 1..20: mol_type = other DNA
caaggaggggccatctggaa

SEQ ID NO: 18291 - DNA, 20 bp, synthetic construct
  misc_feature 1..20: note = Description of Artificial Sequence: Synthetic oligonucleotide
  misc_feature 1..20: note = Target: ANGPTL4; (+) strand; PAM type: YTN; PAM sequence: CTG
  source 1..20: mol_type = other DNA
gaaacttgtggacagagaag

SEQ ID NO: 18292 - DNA, 20 bp, synthetic construct
  misc_feature 1..20: note = Description of Artificial Sequence: Synthetic oligonucleotide
  misc_feature 1..20: note = Target: ANGPTL4; (+) strand; PAM type: YTN; PAM sequence: CTT
  source 1..20: mol_type = other DNA
gtggacagagaagaagacca

SEQ ID NO: 18293 - DNA, 20 bp, synthetic construct
  misc_feature 1..20: note = Description of Artificial Sequence: Synthetic oligonucleotide
  misc_feature 1..20: note = Target: ANGPTL4; (+) strand; PAM type: YTN; PAM sequence: TTG
  source 1..20: mol_type = other DNA
tggacagagaagaagaccac

SEQ ID NO: 18294 - DNA, 20 bp, synthetic construct
  misc_feature 1..20: note = Description of Artificial Sequence: Synthetic oligonucleotide
  misc_feature 1..20: note = Target: ANGPTL4; (+) strand; PAM type: YTN; PAM sequence: CTG
  source 1..20: mol_type = other DNA
gagaagccccctttctgagt

SEQ ID NO: 18295 - DNA, 20 bp, synthetic construct
  misc_feature 1..20: note = Description of Artificial Sequence: Synthetic oligonucleotide
  misc_feature 1..20: note = Target: ANGPTL4; (+) strand; PAM type: YTN; PAM sequence: CTT
  source 1..20: mol_type = other DNA
tctgagtgcaggggggctgc

SEQ ID NO: 18296 - DNA, 20 bp, synthetic construct
  misc_feature 1..20: note = Description of Artificial Sequence: Synthetic oligonucleotide
  misc_feature 1..20: note = Target: ANGPTL4; (+) strand; PAM type: YTN; PAM sequence: TTT
  source 1..20: mol_type = other DNA
ctgagtgcaggggggctgca

SEQ ID NO: 18297 - DNA, 20 bp, synthetic construct
  misc_feature 1..20: note = Description of Artificial Sequence: Synthetic oligonucleotide
  misc_feature 1..20: note = Target: ANGPTL4; (+) strand; PAM type: YTN; PAM sequence: TTC
  source 1..20: mol_type = other DNA
tgagtgcaggggggctgcat

SEQ ID NO: 18298 - DNA, 20 bp, synthetic construct
  misc_feature 1..20: note = Description of Artificial Sequence: Synthetic oligonucleotide
  misc_feature 1..20: note = Target: ANGPTL4; (+) strand; PAM type: YTN; PAM sequence: CTG
  source 1..20: mol_type = other DNA
agtgcaggggggctgcatgc

SEQ ID NO: 18299 - DNA, 20 bp, synthetic construct
  misc_feature 1..20: note = Description of Artificial Sequence: Synthetic oligonucleotide
  misc_feature 1..20: note = Target: ANGPTL4; (+) strand; PAM type: YTN; PAM sequence: CTG
  source 1..20: mol_type = other DNA
catgcgttgcctcctgagat

SEQ ID NO: 18300 - DNA, 20 bp, synthetic construct
  misc_feature 1..20: note = Description of Artificial Sequence: Synthetic oligonucleotide
  misc_feature 1..20: note = Target: ANGPTL4; (+) strand; PAM type: YTN; PAM sequence: TTG
  source 1..20: mol_type = other DNA
cctcctgagatcgaggctgc

SEQ ID NO: 18301 - DNA, 20 bp, synthetic construct
  misc_feature 1..20: note = Description of Artificial Sequence: Synthetic oligonucleotide
  misc_feature 1..20: note = Target: ANGPTL4; (+) strand; PAM type: YTN; PAM sequence: CTC
  source 1..20: mol_type = other DNA
ctgagatcgaggctgcagga

SEQ ID NO: 18302 - DNA, 20 bp, synthetic construct
  misc_feature 1..20: note = Description of Artificial Sequence: Synthetic oligonucleotide
  misc_feature 1..20: note = Target: ANGPTL4; (+) strand; PAM type: YTN; PAM sequence: CTG
  source 1..20: mol_type = other DNA
agatcgaggctgcaggatat

SEQ ID NO: 18303 - DNA, 20 bp, synthetic construct
  misc_feature 1..20: note = Description of Artificial Sequence: Synthetic oligonucleotide
  misc_feature 1..20: note = Target: ANGPTL4; (+) strand; PAM type: YTN; PAM sequence: CTG
  source 1..20: mol_type = other DNA
caggatatgctcagactcta

SEQ ID NO: 18304 - DNA, 20 bp, synthetic construct
  misc_feature 1..20: note = Description of Artificial Sequence: Synthetic oligonucleotide
  misc_feature 1..20: note = Target: ANGPTL4; (+) strand; PAM type: YTN; PAM sequence: CTC
  source 1..20: mol_type = other DNA
agactctagaggcgtggacc

SEQ ID NO: 18305 - DNA, 20 bp, synthetic construct
  misc_feature 1..20: note = Description of Artificial Sequence: Synthetic oligonucleotide
  misc_feature 1..20: note = Target: ANGPTL4; (+) strand; PAM type: YTN; PAM sequence: CTC
  source 1..20: mol_type = other DNA
tagaggcgtggaccaagggg

SEQ ID NO: 18306 - DNA, 20 bp, synthetic construct
  misc_feature 1..20: note = Description of Artificial Sequence: Synthetic oligonucleotide
  misc_feature 1..20: note = Target: ANGPTL4; (+) strand; PAM type: YTN; PAM sequence: CTA
  source 1..20: mol_type = other DNA
gaggcgtggaccaaggggca

SEQ ID NO: 18307 - DNA, 20 bp, synthetic construct
  misc_feature 1..20: note = Description of Artificial Sequence: Synthetic oligonucleotide
  misc_feature 1..20: note = Target: ANGPTL4; (+) strand; PAM type: YTN; PAM sequence: CTT
  source 1..20: mol_type = other DNA
cactccttgctggccaggga

SEQ ID NO: 18308 - DNA, 20 bp, synthetic construct
  misc_feature 1..20: note = Description of Artificial Sequence: Synthetic oligonucleotide
  misc_feature 1..20: note = Target: ANGPTL4; (+) strand; PAM type: YTN; PAM sequence: TTC
  source 1..20: mol_type = other DNA
actccttgctggccagggag

SEQ ID NO: 18309 - DNA, 20 bp, synthetic construct
  misc_feature 1..20: note = Description of Artificial Sequence: Synthetic oligonucleotide
  misc_feature 1..20: note = Target: ANGPTL4; (+) strand; PAM type: YTN; PAM sequence: CTC
  source 1..20: mol_type = other DNA
cttgctggccagggagttgg

SEQ ID NO: 18310 - DNA, 20 bp, synthetic construct
  misc_feature 1..20: note = Description of Artificial Sequence: Synthetic oligonucleotide
  misc_feature 1..20: note = Target: ANGPTL4; (+) strand; PAM type: YTN; PAM sequence: CTT
  source 1..20: mol_type = other DNA
gctggccagggagttgggga

SEQ ID NO: 18311 - DNA, 20 bp, synthetic construct
  misc_feature 1..20: note = Description of Artificial Sequence: Synthetic oligonucleotide
  misc_feature 1..20: note = Target: ANGPTL4; (+) strand; PAM type: YTN; PAM sequence: TTG
  source 1..20: mol_type = other DNA
ctggccagggagttggggac

SEQ ID NO: 18312 - DNA, 20 bp, synthetic construct
  misc_feature 1..20: note = Description of Artificial Sequence: Synthetic oligonucleotide
  misc_feature 1..20: note = Target: ANGPTL4; (+) strand; PAM type: YTN; PAM sequence: CTG
  source 1..20: mol_type = other DNA
gccagggagttggggactca

SEQ ID NO: 18313 - DNA, 20 bp, synthetic construct
  misc_feature 1..20: note = Description of Artificial Sequence: Synthetic oligonucleotide
  misc_feature 1..20: note = Target: ANGPTL4; (+) strand; PAM type: YTN; PAM sequence: TTG
  source 1..20: mol_type = other DNA
gggactcagagggaccactt

SEQ ID NO: 18314 - DNA, 20 bp, synthetic construct
  misc_feature 1..20: note = Description of Artificial Sequence: Synthetic oligonucleotide
  misc_feature 1..20: note = Target: ANGPTL4; (+) strand; PAM type: YTN; PAM sequence: CTC
  source 1..20: mol_type = other DNA
agagggaccacttggggcca

SEQ ID NO: 18315 - DNA, 20 bp, synthetic construct
  misc_feature 1..20: note = Description of Artificial Sequence: Synthetic oligonucleotide
  misc_feature 1..20: note = Target: ANGPTL4; (+) strand; PAM type: YTN; PAM sequence: CTT
  source 1..20: mol_type = other DNA
ggggccagccagactggcct

SEQ ID NO: 18316 - DNA, 20 bp, synthetic construct
  misc_feature 1..20: note = Description of Artificial Sequence: Synthetic oligonucleotide
  misc_feature 1..20: note = Target: ANGPTL4; (+) strand; PAM type: YTN; PAM sequence: TTG
  source 1..20: mol_type = other DNA
gggccagccagactggcctc

SEQ ID NO: 18317 - DNA, 20 bp, synthetic construct
  misc_feature 1..20: note = Description of Artificial Sequence: Synthetic oligonucleotide
  misc_feature 1..20: note = Target: ANGPTL4; (+) strand; PAM type: YTN; PAM sequence: CTG
  source 1..20: mol_type = other DNA
gcctcaatggcggactcagt

SEQ ID NO: 18318 - DNA, 20 bp, synthetic construct
  misc_feature 1..20: note = Description of Artificial Sequence: Synthetic oligonucleotide
  misc_feature 1..20: note = Target: ANGPTL4; (+) strand; PAM type: YTN; PAM sequence: CTC
  source 1..20: mol_type = other DNA
aatggcggactcagtcacat

SEQ ID NO: 18319 - DNA, 20 bp, synthetic construct
  misc_feature 1..20: note = Description of Artificial Sequence: Synthetic oligonucleotide
  misc_feature 1..20: note = Target: ANGPTL4; (+) strand; PAM type: YTN; PAM sequence: CTC
  source 1..20: mol_type = other DNA
agtcacattgactgacgggg

SEQ ID NO: 18320 - DNA, 20 bp, synthetic construct
  misc_feature 1..20: note = Description of Artificial Sequence: Synthetic oligonucleotide
  misc_feature 1..20: note = Target: ANGPTL4; (+) strand; PAM type: YTN; PAM sequence: TTG
  source 1..20: mol_type = other DNA
actgacggggaccagggctt

SEQ ID NO: 18321 - DNA, 20 bp, synthetic construct
  misc_feature 1..20: note = Description of Artificial Sequence: Synthetic oligonucleotide
  misc_feature 1..20: note = Target: ANGPTL4; (+) strand; PAM type: YTN; PAM sequence: CTG
  source 1..20: mol_type = other DNA
acggggaccagggcttgtgt

SEQ ID NO: 18322 - DNA, 20 bp, synthetic construct
  misc_feature 1..20: note = Description of Artificial Sequence: Synthetic oligonucleotide
  misc_feature 1..20: note = Target: ANGPTL4; (+) strand; PAM type: YTN; PAM sequence: CTT
  source 1..20: mol_type = other DNA
gtgtgggtcgagagcgccct

SEQ ID NO: 18323 - DNA, 20 bp, synthetic construct
  misc_feature 1..20: note = Description of Artificial Sequence: Synthetic oligonucleotide
  misc_feature 1..20: note = Target: ANGPTL4; (+) strand; PAM type: YTN; PAM sequence: TTG
  source 1..20: mol_type = other DNA
tgtgggtcgagagcgccctc

SEQ ID NO: 18324 - DNA, 20 bp, synthetic construct
  misc_feature 1..20: note = Description of Artificial Sequence: Synthetic oligonucleotide
  misc_feature 1..20: note = Target: ANGPTL4; (+) strand; PAM type: YTN; PAM sequence: CTC
  source 1..20: mol_type = other DNA
atggtgctggtgctgttgtg

SEQ ID NO: 18325 - DNA, 20 bp, synthetic construct
  misc_feature 1..20: note = Description of Artificial Sequence: Synthetic oligonucleotide
  misc_feature 1..20: note = Target: ANGPTL4; (+) strand; PAM type: YTN; PAM sequence: CTG
  source 1..20: mol_type = other DNA
gtgctgttgtgtgtaggtcc

SEQ ID NO: 18326 - DNA, 20 bp, synthetic construct
  misc_feature 1..20: note = Description of Artificial Sequence: Synthetic oligonucleotide
  misc_feature 1..20: note = Target: ANGPTL4; (+) strand; PAM type: YTN; PAM sequence: CTG
  source 1..20: mol_type = other DNA
ttgtgtgtaggtcccctggg

SEQ ID NO: 18327 - DNA, 20 bp, synthetic construct
  misc_feature 1..20: note = Description of Artificial Sequence: Synthetic oligonucleotide
  misc_feature 1..20: note = Target: ANGPTL4; (+) strand; PAM type: YTN; PAM sequence: TTG
  source 1..20: mol_type = other DNA
tgtgtaggtcccctggggac

SEQ ID NO: 18328 - DNA, 20 bp, synthetic construct
  misc_feature 1..20: note = Description of Artificial Sequence: Synthetic oligonucleotide
  misc_feature 1..20: note = Target: ANGPTL4; (+) strand; PAM type: YTN; PAM sequence: CTG
  source 1..20: mol_type = other DNA
gggacacaagcaggcgccaa

SEQ ID NO: 18329 - DNA, 20 bp, synthetic construct
  misc_feature 1..20: note = Description of Artificial Sequence: Synthetic oligonucleotide
  misc_feature 1..20: note = Target: ANGPTL4; (+) strand; PAM type: YTN; PAM sequence: CTG
  source 1..20: mol_type = other DNA
ggcggagctcacagagttct

SEQ ID NO: 18330 - DNA, 20 bp, synthetic construct
  misc_feature 1..20: note = Description of Artificial Sequence: Synthetic oligonucleotide
  misc_feature 1..20: note = Target: ANGPTL4; (+) strand; PAM type: YTN; PAM sequence: CTC
  source 1..20: mol_type = other DNA
acagagttcttggaataaaa

SEQ ID NO: 18331 - DNA, 20 bp, synthetic construct
  misc_feature 1..20: note = Description of Artificial Sequence: Synthetic oligonucleotide
  misc_feature 1..20: note = Target: ANGPTL4; (+) strand; PAM type: YTN; PAM sequence: TTC
  source 1..20: mol_type = other DNA
ttggaataaaagcaacctca

SEQ ID NO: 18332 - DNA, 20 bp, synthetic construct
  misc_feature 1..20: note = Description of Artificial Sequence: Synthetic oligonucleotide
  misc_feature 1..20: note = Target: ANGPTL4; (+) strand; PAM type: YTN; PAM sequence: CTT
  source 1..20: mol_type = other DNA
ggaataaaagcaacctcaga

SEQ ID NO: 18333 - DNA, 20 bp, synthetic construct
  misc_feature 1..20: note = Description of Artificial Sequence: Synthetic oligonucleotide
  misc_feature 1..20: note = Target: ANGPTL4; (+) strand; PAM type: YTN; PAM sequence: TTG
  source 1..20: mol_type = other DNA
gaataaaagcaacctcagaa

SEQ ID NO: 18334 - DNA, 20 bp, synthetic construct
  misc_feature 1..20: note = Description of Artificial Sequence: Synthetic oligonucleotide
  misc_feature 1..20: note = Target: ANGPTL4; (+) strand; PAM type: YTN; PAM sequence: CTC
  source 1..20: mol_type = other DNA
agaacactttgttctttgtt

SEQ ID NO: 18335 - DNA, 20 bp, synthetic construct
  misc_feature 1..20: note = Description of Artificial Sequence: Synthetic oligonucleotide
  misc_feature 1..20: note = Target: ANGPTL4; (+) strand; PAM type: YTN; PAM sequence: CTT
  source 1..20: mol_type = other DNA
tgttctttgttcttgtttgt

SEQ ID NO: 18336 - DNA, 20 bp, synthetic construct
  misc_feature 1..20: note = Description of Artificial Sequence: Synthetic oligonucleotide
  misc_feature 1..20: note = Target: ANGPTL4; (+) strand; PAM type: YTN; PAM sequence: TTT
  source 1..20: mol_type = other DNA
gttctttgttcttgtttgtt

SEQ ID NO: 18337 - DNA, 20 bp, synthetic construct
  misc_feature 1..20: note = Description of Artificial Sequence: Synthetic oligonucleotide
  misc_feature 1..20: note = Target: ANGPTL4; (+) strand; PAM type: YTN; PAM sequence: TTG
  source 1..20: mol_type = other DNA
ttctttgttcttgtttgttt

SEQ ID NO: 18338 - DNA, 20 bp, synthetic construct
  misc_feature 1..20: note = Description of Artificial Sequence: Synthetic oligonucleotide
  misc_feature 1..20: note = Target: ANGPTL4; (+) strand; PAM type: YTN; PAM sequence: TTC
  source 1..20: mol_type = other DNA
tttgttcttgtttgttttct

SEQ ID NO: 18339 - DNA, 20 bp, synthetic construct
  misc_feature 1..20: note = Description of Artificial Sequence: Synthetic oligonucleotide
  misc_feature 1..20: note = Target: ANGPTL4; (+) strand; PAM type: YTN; PAM sequence: CTT
  source 1..20: mol_type = other DNA
tgttcttgtttgttttcttt

SEQ ID NO: 18340 - DNA, 20 bp, synthetic construct
  misc_feature 1..20: note = Description of Artificial Sequence: Synthetic oligonucleotide
  misc_feature 1..20: note = Target: ANGPTL4; (+) strand; PAM type: YTN; PAM sequence: TTT
  source 1..20: mol_type = other DNA
gttcttgtttgttttctttc

SEQ ID NO: 18341 - DNA, 20 bp, synthetic construct
  misc_feature 1..20: note = Description of Artificial Sequence: Synthetic oligonucleotide
  misc_feature 1..20: note = Target: ANGPTL4; (+) strand; PAM type: YTN; PAM sequence: TTG
  source 1..20: mol_type = other DNA
ttcttgtttgttttctttct

SEQ ID NO: 18342 - DNA, 20 bp, synthetic construct
  misc_feature 1..20: note = Description of Artificial Sequence: Synthetic oligonucleotide
  misc_feature 1..20: note = Target: ANGPTL4; (+) strand; PAM type: YTN; PAM sequence: TTC
  source 1..20: mol_type = other DNA
ttgtttgttttctttctttt

SEQ ID NO: 18343 - DNA, 20 bp, synthetic construct
  misc_feature 1..20: note = Description of Artificial Sequence: Synthetic oligonucleotide
  misc_feature 1..20: note = Target: ANGPTL4; (+) strand; PAM type: YTN; PAM sequence: CTT
  source 1..20: mol_type = other DNA
gtttgttttctttctttttt

SEQ ID NO: 18344 - DNA, 20 bp, synthetic construct
  misc_feature 1..20: note = Description of Artificial Sequence: Synthetic oligonucleotide
  misc_feature 1..20: note = Target: ANGPTL4; (+) strand; PAM type: YTN; PAM sequence: TTG
  source 1..20: mol_type = other DNA
tttgttttctttcttttttt

SEQ ID NO: 18345 - DNA, 20 bp, synthetic construct
  misc_feature 1..20: note = Description of Artificial Sequence: Synthetic oligonucleotide
  misc_feature 1..20: note = Target: ANGPTL4; (+) strand; PAM type: YTN; PAM sequence: TTT
  source 1..20: mol_type = other DNA
gttttctttcttttttttct

SEQ ID NO: 18346 - DNA, 20 bp, synthetic construct
  misc_feature 1..20: note = Description of Artificial Sequence: Synthetic oligonucleotide
  misc_feature 1..20: note = Target: ANGPTL4; (+) strand; PAM type: YTN; PAM sequence: TTG
  source 1..20: mol_type = other DNA
ttttctttcttttttttctc

SEQ ID NO: 18347 - DNA, 20 bp, synthetic construct
  misc_feature 1..20: note = Description of Artificial Sequence: Synthetic oligonucleotide
  misc_feature 1..20: note = Target: ANGPTL4; (+) strand; PAM type: YTN; PAM sequence: TTT
  source 1..20: mol_type = other DNA
tctttcttttttttctcttt

SEQ ID NO: 18348 - DNA, 20 bp, synthetic construct
  misc_feature 1..20: note = Description of Artificial Sequence: Synthetic oligonucleotide
  misc_feature 1..20: note = Target: ANGPTL4; (+) strand; PAM type: YTN; PAM sequence: TTT
  source 1..20: mol_type = other DNA
ctttcttttttttctctttc

SEQ ID NO: 18349 - DNA, 20 bp, synthetic construct
  misc_feature 1..20: note = Description of Artificial Sequence: Synthetic oligonucleotide
  misc_feature 1..20: note = Target: ANGPTL4; (+) strand; PAM type: YTN; PAM sequence: TTC
  source 1..20: mol_type = other DNA
tttcttttttttctctttct

SEQ ID NO: 18350 - DNA, 20 bp, synthetic construct
  misc_feature 1..20: note = Description of Artificial Sequence: Synthetic oligonucleotide
  misc_feature 1..20: note = Target: ANGPTL4; (+) strand; PAM type: YTN; PAM sequence: CTT
  source 1..20: mol_type = other DNA
tcttttttttctctttcttt

SEQ ID NO: 18351 - DNA, 20 bp, synthetic construct
  misc_feature 1..20: note = Description of Artificial Sequence: Synthetic oligonucleotide
  misc_feature 1..20: note = Target: ANGPTL4; (+) strand; PAM type: YTN; PAM sequence: TTT
  source 1..20: mol_type = other DNA
cttttttttctctttcttta

SEQ ID NO: 18352 - DNA, 20 bp, synthetic construct
  misc_feature 1..20: note = Description of Artificial Sequence: Synthetic oligonucleotide
  misc_feature 1..20: note = Target: ANGPTL4; (+) strand; PAM type: YTN; PAM sequence: TTC
  source 1..20: mol_type = other DNA
ttttttttctctttctttag

SEQ ID NO: 18353 - DNA, 20 bp, synthetic construct
  misc_feature 1..20: note = Description of Artificial Sequence: Synthetic oligonucleotide
  misc_feature 1..20: note = Target: ANGPTL4; (+) strand; PAM type: YTN; PAM sequence: CTT
  source 1..20: mol_type = other DNA
ttttttctctttctttagtt

SEQ ID NO: 18354 - DNA, 20 bp, synthetic construct
  misc_feature 1..20: note = Description of Artificial Sequence: Synthetic oligonucleotide
  misc_feature 1..20: note = Target: ANGPTL4; (+) strand; PAM type: YTN; PAM sequence: TTT
  source 1..20: mol_type = other DNA
tttttctctttctttagttc

SEQ ID NO: 18355 - DNA, 20 bp, synthetic construct
  misc_feature 1..20: note = Description of Artificial Sequence: Synthetic oligonucleotide
  misc_feature 1..20: note = Target: ANGPTL4; (+) strand; PAM type: YTN; PAM sequence: TTT
  source 1..20: mol_type = other DNA
ttttctctttctttagttca

SEQ ID NO: 18356 - DNA, 20 bp, synthetic construct
  misc_feature 1..20: note = Description of Artificial Sequence: Synthetic oligonucleotide
  misc_feature 1..20: note = Target: ANGPTL4; (+) strand; PAM type: YTN; PAM sequence: TTT
  source 1..20: mol_type = other DNA
tttctctttctttagttcac

SEQ ID NO: 18357 - DNA, 20 bp, synthetic construct
  misc_feature 1..20: note = Description of Artificial Sequence: Synthetic oligonucleotide
  misc_feature 1..20: note = Target: ANGPTL4; (+) strand; PAM type: YTN; PAM sequence: TTT
  source 1..20: mol_type = other DNA
ttctctttctttagttcaca

SEQ ID NO: 18358 - DNA, 20 bp, synthetic construct
  misc_feature 1..20: note = Description of Artificial Sequence: Synthetic oligonucleotide
  misc_feature 1..20: note = Target: ANGPTL4; (+) strand; PAM type: YTN; PAM sequence: TTT
  source 1..20: mol_type = other DNA
tctctttctttagttcacag

SEQ ID NO: 18359 - DNA, 20 bp, synthetic construct
  misc_feature 1..20: note = Description of Artificial Sequence: Synthetic oligonucleotide
  misc_feature 1..20: note = Target: ANGPTL4; (+) strand; PAM type: YTN; PAM sequence: TTT
  source 1..20: mol_type = other DNA
ctctttctttagttcacaga

SEQ ID NO: 18360 - DNA, 20 bp, synthetic construct
  misc_feature 1..20: note = Description of Artificial Sequence: Synthetic oligonucleotide
  misc_feature 1..20: note = Target: ANGPTL4; (+) strand; PAM type: YTN; PAM sequence: TTC
  source 1..20: mol_type = other DNA
tctttctttagttcacagat

SEQ ID NO: 18361 - DNA, 20 bp, synthetic construct
  misc_feature 1..20: note = Description of Artificial Sequence: Synthetic oligonucleotide
  misc_feature 1..20: note = Target: ANGPTL4; (+) strand; PAM type: YTN; PAM sequence: CTC
  source 1..20: mol_type = other DNA
tttctttagttcacagatct

SEQ ID NO: 18362 - DNA, 20 bp, synthetic construct
  misc_feature 1..20: note = Description of Artificial Sequence: Synthetic oligonucleotide
  misc_feature 1..20: note = Target: ANGPTL4; (+) strand; PAM type: YTN; PAM sequence: CTT
  source 1..20: mol_type = other DNA
tctttagttcacagatctag

SEQ ID NO: 18363 - DNA, 20 bp, synthetic construct
  misc_feature 1..20: note = Description of Artificial Sequence: Synthetic oligonucleotide
  misc_feature 1..20: note = Target: ANGPTL4; (+) strand; PAM type: YTN; PAM sequence: TTT
  source 1..20: mol_type = other DNA
ctttagttcacagatctagt

SEQ ID NO: 18364 - DNA, 20 bp, synthetic construct
  misc_feature 1..20: note = Description of Artificial Sequence: Synthetic oligonucleotide
  misc_feature 1..20: note = Target: ANGPTL4; (+) strand; PAM type: YTN; PAM sequence: TTC
  source 1..20: mol_type = other DNA
tttagttcacagatctagta

SEQ ID NO: 18365 - DNA, 20 bp, synthetic construct
  misc_feature 1..20: note = Description of Artificial Sequence: Synthetic oligonucleotide
  misc_feature 1..20: note = Target: ANGPTL4; (+) strand; PAM type: YTN; PAM sequence: CTT
  source 1..20: mol_type = other DNA
tagttcacagatctagtaag

SEQ ID NO: 18366 - DNA, 20 bp, synthetic construct
  misc_feature 1..20: note = Description of Artificial Sequence: Synthetic oligonucleotide
  misc_feature 1..20: note = Target: ANGPTL4; (+) strand; PAM type: YTN; PAM sequence: TTT
  source 1..20: mol_type = other DNA
agttcacagatctagtaagt

SEQ ID NO: 18367 - DNA, 20 bp, synthetic construct
  misc_feature 1..20: note = Description of Artificial Sequence: Synthetic oligonucleotide
  misc_feature 1..20: note = Target: ANGPTL4; (+) strand; PAM type: YTN; PAM sequence: TTA
  source 1..20: mol_type = other DNA
gttcacagatctagtaagtt

SEQ ID NO: 18368 - DNA, 20 bp, synthetic construct
  misc_feature 1..20: note = Description of Artificial Sequence: Synthetic oligonucleotide
  misc_feature 1..20: note = Target: ANGPTL4; (+) strand; PAM type: YTN; PAM sequence: TTC
  source 1..20: mol_type = other DNA
acagatctagtaagttaccc

SEQ ID NO: 18369 - DNA, 20 bp, synthetic construct
  misc_feature 1..20: note = Description of Artificial Sequence: Synthetic oligonucleotide
  misc_feature 1..20: note = Target: ANGPTL4; (+) strand; PAM type: YTN; PAM sequence: CTA
  source 1..20: mol_type = other DNA
gtaagttaccctcagtttgt

SEQ ID NO: 18370 - DNA, 20 bp, synthetic construct
  misc_feature 1..20: note = Description of Artificial Sequence: Synthetic oligonucleotide
  misc_feature 1..20: note = Target: ANGPTL4; (+) strand; PAM type: YTN; PAM sequence: TTA
  source 1..20: mol_type = other DNA
ccctcagtttgttttaaaaa

SEQ ID NO: 18371 - DNA, 20 bp, synthetic construct
  misc_feature 1..20: note = Description of Artificial Sequence: Synthetic oligonucleotide
  misc_feature 1..20: note = Target: ANGPTL4; (+) strand; PAM type: YTN; PAM sequence: CTC
  source 1..20: mol_type = other DNA
agtttgttttaaaaagtgaa

SEQ ID NO: 18372 - DNA, 20 bp, synthetic construct
  misc_feature 1..20: note = Description of Artificial Sequence: Synthetic oligonucleotide
  misc_feature 1..20: note = Target: ANGPTL4; (+) strand; PAM type: YTN; PAM sequence: TTT
  source 1..20: mol_type = other DNA
gttttaaaaagtgaacaaag

SEQ ID NO: 18373 - DNA, 20 bp, synthetic construct
  misc_feature 1..20: note = Description of Artificial Sequence: Synthetic oligonucleotide
  misc_feature 1..20: note = Target: ANGPTL4; (+) strand; PAM type: YTN; PAM sequence: TTG
  source 1..20: mol_type = other DNA
ttttaaaaagtgaacaaagt

SEQ ID NO: 18374 - DNA, 20 bp, synthetic construct
  misc_feature 1..20: note = Description of Artificial Sequence: Synthetic oligonucleotide
  misc_feature 1..20: note = Target: ANGPTL4; (+) strand; PAM type: YTN; PAM sequence: TTT
  source 1..20: mol_type = other DNA
taaaaagtgaacaaagtcca

SEQ ID NO: 18375 - DNA, 20 bp, synthetic construct
  misc_feature 1..20: note = Description of Artificial Sequence: Synthetic oligonucleotide
  misc_feature 1..20: note = Target: ANGPTL4; (+) strand; PAM type: YTN; PAM sequence: TTT
  source 1..20: mol_type = other DNA
aaaaagtgaacaaagtccat

SEQ ID NO: 18376 - DNA, 20 bp, synthetic construct
  misc_feature 1..20: note = Description of Artificial Sequence: Synthetic oligonucleotide
  misc_feature 1..20: note = Target: ANGPTL4; (+) strand; PAM type: YTN; PAM sequence: TTA
  source 1..20: mol_type = other DNA
aaaagtgaacaaagtccatg

SEQ ID NO: 18377 - DNA, 20 bp, synthetic construct
  misc_feature 1..20: note = Description of Artificial Sequence: Synthetic oligonucleotide
  misc_feature 1..20: note = Target: ANGPTL4; (+) strand; PAM type: YTN; PAM sequence: TTC
  source 1..20: mol_type = other DNA
ccagggccaggcacggtgtc

SEQ ID NO: 18378 - DNA, 20 bp, synthetic construct
  misc_feature 1..20: note = Description of Artificial Sequence: Synthetic oligonucleotide
  misc_feature 1..20: note = Target: ANGPTL4; (+) strand; PAM type: YTN; PAM sequence: CTC
  source 1..20: mol_type = other DNA
gtgcctgtaatcccagccat

SEQ ID NO: 18379 - DNA, 20 bp, synthetic construct
  misc_feature 1..20: note = Description of Artificial Sequence: Synthetic oligonucleotide
  misc_feature 1..20: note = Target: ANGPTL4; (+) strand; PAM type: YTN; PAM sequence: CTG
  source 1..20: mol_type = other DNA
taatcccagccatttgtgag

SEQ ID NO: 18380 - DNA, 20 bp, synthetic construct
  misc_feature 1..20: note = Description of Artificial Sequence: Synthetic oligonucleotide
  misc_feature 1..20: note = Target: ANGPTL4; (+) strand; PAM type: YTN; PAM sequence: TTT
  source 1..20: mol_type = other DNA
gtgaggccgagacaggcagg

SEQ ID NO: 18381 - DNA, 20 bp, synthetic construct
  misc_feature 1..20: note = Description of Artificial Sequence: Synthetic oligonucleotide
  misc_feature 1..20: note = Target: ANGPTL4; (+) strand; PAM type: YTN; PAM sequence: TTG
  source 1..20: mol_type = other DNA
tgaggccgagacaggcaggt

SEQ ID NO: 18382 - DNA, 20 bp, synthetic construct
  misc_feature 1..20: note = Description of Artificial Sequence: Synthetic oligonucleotide
  misc_feature 1..20: note = Target: ANGPTL4; (+) strand; PAM type: YTN; PAM sequence: CTT
  source 1..20: mol_type = other DNA
gaggtcagcagttcgagacc

SEQ ID NO: 18383 - DNA, 20 bp, synthetic construct
  misc_feature 1..20: note = Description of Artificial Sequence: Synthetic oligonucleotide
  misc_feature 1..20: note = Target: ANGPTL4; (+) strand; PAM type: YTN; PAM sequence: TTG
  source 1..20: mol_type = other DNA
aggtcagcagttcgagacca

SEQ ID NO: 18384 - DNA, 20 bp, synthetic construct
  misc_feature 1..20: note = Description of Artificial Sequence: Synthetic oligonucleotide
  misc_feature 1..20: note = Target: ANGPTL4; (+) strand; PAM type: YTN; PAM sequence: TTC
  source 1..20: mol_type = other DNA
gagaccagccgggccaacat

SEQ ID NO: 18385 - DNA, 20 bp, synthetic construct
  misc_feature 1..20: note = Description of Artificial Sequence: Synthetic oligonucleotide
  misc_feature 1..20: note = Target: ANGPTL4; (+) strand; PAM type: YTN; PAM sequence: CTC
  source 1..20: mol_type = other DNA
tacaaaaaaatacaaaaatt

SEQ ID NO: 18386 - DNA, 20 bp, synthetic construct
  misc_feature 1..20: note = Description of Artificial Sequence: Synthetic oligonucleotide
  misc_feature 1..20: note = Target: ANGPTL4; (+) strand; PAM type: YTN; PAM sequence: CTA
  source 1..20: mol_type = other DNA
caaaaaaatacaaaaattag

SEQ ID NO: 18387 - DNA, 20 bp, synthetic construct
  misc_feature 1..20: note = Description of Artificial Sequence: Synthetic oligonucleotide
  misc_feature 1..20: note = Target: ANGPTL4; (+) strand; PAM type: YTN; PAM sequence: TTA
  source 1..20: mol_type = other DNA
gccgagcatggtggtgcacg

SEQ ID NO: 18388 - DNA, 20 bp, synthetic construct
  misc_feature 1..20: note = Description of Artificial Sequence: Synthetic oligonucleotide
  misc_feature 1..20: note = Target: ANGPTL4; (+) strand; PAM type: YTN; PAM sequence: CTG
  source 1..20: mol_type = other DNA
tagtcccagctactctagag

SEQ ID NO: 18389 - DNA, 20 bp, synthetic construct
  misc_feature 1..20: note = Description of Artificial Sequence: Synthetic oligonucleotide
  misc_feature 1..20: note = Target: ANGPTL4; (+) strand; PAM type: YTN; PAM sequence: CTA
  source 1..20: mol_type = other DNA
ctctagaggctgacgcagaa

SEQ ID NO: 18390 - DNA, 20 bp, synthetic construct
  misc_feature 1..20: note = Description of Artificial Sequence: Synthetic oligonucleotide
  misc_feature 1..20: note = Target: ANGPTL4; (+) strand; PAM type: YTN; PAM sequence: CTC
  source 1..20: mol_type = other DNA
tagaggctgacgcagaagaa

SEQ ID NO: 18391 - DNA, 20 bp, synthetic construct
  misc_feature 1..20: note = Description of Artificial Sequence: Synthetic oligonucleotide
  misc_feature 1..20: note = Target: ANGPTL4; (+) strand; PAM type: YTN; PAM sequence: CTA
  source 1..20: mol_type = other DNA
gaggctgacgcagaagaatc

SEQ ID NO: 18392 - DNA, 20 bp, synthetic construct
  misc_feature 1..20: note = Description of Artificial Sequence: Synthetic oligonucleotide
  misc_feature 1..20: note = Target: ANGPTL4; (+) strand; PAM type: YTN; PAM sequence: CTG
  source 1..20: mol_type = other DNA
acgcagaagaatcacttgag

SEQ ID NO: 18393 - DNA, 20 bp, synthetic construct
  misc_feature 1..20: note = Description of Artificial Sequence: Synthetic oligonucleotide
  misc_feature 1..20: note = Target: ANGPTL4; (+) strand; PAM type: YTN; PAM sequence: CTT
  source 1..20: mol_type = other DNA
gagccaaggaggcagaggct

SEQ ID NO: 18394 - DNA, 20 bp, synthetic construct
  misc_feature 1..20: note = Description of Artificial Sequence: Synthetic oligonucleotide
  misc_feature 1..20: note = Target: ANGPTL4; (+) strand; PAM type: YTN; PAM sequence: TTG
  source 1..20: mol_type = other DNA
agccaaggaggcagaggctg

SEQ ID NO: 18395 - DNA, 20 bp, synthetic construct
  misc_feature 1..20: note = Description of Artificial Sequence: Synthetic oligonucleotide
  misc_feature 1..20: note = Target: ANGPTL4; (+) strand; PAM type: YTN; PAM sequence: CTG
  source 1..20: mol_type = other DNA
caaataagccgagattgcgc

SEQ ID NO: 18396 - DNA, 20 bp, synthetic construct
  misc_feature 1..20: note = Description of Artificial Sequence: Synthetic oligonucleotide
  misc_feature 1..20: note = Target: ANGPTL4; (+) strand; PAM type: YTN; PAM sequence: TTG
  source 1..20: mol_type = other DNA
cgccactgcactccagcctg

SEQ ID NO: 18397 - DNA, 20 bp, synthetic construct
  misc_feature 1..20: note = Description of Artificial Sequence: Synthetic oligonucleotide
  misc_feature 1..20: note = Target: ANGPTL4; (+) strand; PAM type: YTN; PAM sequence: CTG
  source 1..20: mol_type = other DNA
cactccagcctgggcaacag

SEQ ID NO: 18398 - DNA, 20 bp, synthetic construct
  misc_feature 1..20: note = Description of Artificial Sequence: Synthetic oligonucleotide
  misc_feature 1..20: note = Target: ANGPTL4; (+) strand; PAM type: YTN; PAM sequence: CTC
  source 1..20: mol_type = other DNA
cagcctgggcaacagagcaa

SEQ ID NO: 18399 - DNA, 20 bp, synthetic construct
  misc_feature 1..20: note = Description of Artificial Sequence: Synthetic oligonucleotide
  misc_feature 1..20: note = Target: ANGPTL4; (+) strand; PAM type: YTN; PAM sequence: CTG
  source 1..20: mol_type = other DNA
ggcaacagagcaagactcca

SEQ ID NO: 18400 - DNA, 20 bp, synthetic construct
  misc_feature 1..20: note = Description of Artificial Sequence: Synthetic oligonucleotide
  misc_feature 1..20: note = Target: ANGPTL4; (+) strand; PAM type: YTN; PAM sequence: CTC
  source 1..20: mol_type = other DNA
catctcaaaacaaaaataat

SEQ ID NO: 18401 - DNA, 20 bp, synthetic construct
  misc_feature 1..20: note = Description of Artificial Sequence: Synthetic oligonucleotide
  misc_feature 1..20: note = Target: ANGPTL4; (+) strand; PAM type: YTN; PAM sequence: CTC
  source 1..20: mol_type = other DNA
aaaacaaaaataattttttt

SEQ ID NO: 18402 - DNA, 20 bp, synthetic construct
  misc_feature 1..20: note = Description of Artificial Sequence: Synthetic oligonucleotide
  misc_feature 1..20: note = Target: ANGPTL4; (+) strand; PAM type: YTN; PAM sequence: TTT
  source 1..20: mol_type = other DNA
ttttttcgtagaggcagggt

SEQ ID NO: 18403 - DNA, 20 bp, synthetic construct
  misc_feature 1..20: note = Description of Artificial Sequence: Synthetic oligonucleotide
  misc_feature 1..20: note = Target: ANGPTL4; (+) strand; PAM type: YTN; PAM sequence: TTT
  source 1..20: mol_type = other DNA
tttttcgtagaggcagggtc

SEQ ID NO: 18404 - DNA, 20 bp, synthetic construct
  misc_feature 1..20: note = Description of Artificial Sequence: Synthetic oligonucleotide
  misc_feature 1..20: note = Target: ANGPTL4; (+) strand; PAM type: YTN; PAM sequence: TTT
  source 1..20: mol_type = other DNA
ttttcgtagaggcagggtct

SEQ ID NO: 18405 - DNA, 20 bp, synthetic construct
  misc_feature 1..20: note = Description of Artificial Sequence: Synthetic oligonucleotide
  misc_feature 1..20: note = Target: ANGPTL4; (+) strand; PAM type: YTN; PAM sequence: TTT
  source 1..20: mol_type = other DNA
tttcgtagaggcagggtctc

SEQ ID NO: 18406 - DNA, 20 bp, synthetic construct
  misc_feature 1..20: note = Description of Artificial Sequence: Synthetic oligonucleotide
  misc_feature 1..20: note = Target: ANGPTL4; (+) strand; PAM type: YTN; PAM sequence: TTT
  source 1..20: mol_type = other DNA
ttcgtagaggcagggtctca

SEQ ID NO: 18407 - DNA, 20 bp, synthetic construct
  misc_feature 1..20: note = Description of Artificial Sequence: Synthetic oligonucleotide
  misc_feature 1..20: note = Target: ANGPTL4; (+) strand; PAM type: YTN; PAM sequence: TTT
  source 1..20: mol_type = other DNA
tcgtagaggcagggtctcat

SEQ ID NO: 18408 - DNA, 20 bp, synthetic construct
  misc_feature 1..20: note = Description of Artificial Sequence: Synthetic oligonucleotide
  misc_feature 1..20: note = Target: ANGPTL4; (+) strand; PAM type: YTN; PAM sequence: TTT
  source 1..20: mol_type = other DNA
cgtagaggcagggtctcatt

SEQ ID NO: 18409 - DNA, 20 bp, synthetic construct
  misc_feature 1..20: note = Description of Artificial Sequence: Synthetic oligonucleotide
  misc_feature 1..20: note = Target: ANGPTL4; (+) strand; PAM type: YTN; PAM sequence: TTC
  source 1..20: mol_type = other DNA
gtagaggcagggtctcattc

SEQ ID NO: 18410 - DNA, 20 bp, synthetic construct
  misc_feature 1..20: note = Description of Artificial Sequence: Synthetic oligonucleotide
  misc_feature 1..20: note = Target: ANGPTL4; (+) strand; PAM type: YTN; PAM sequence: CTC
  source 1..20: mol_type = other DNA
attctattgtccaggctggt

SEQ ID NO: 18411 - DNA, 20 bp, synthetic construct
  misc_feature 1..20: note = Description of Artificial Sequence: Synthetic oligonucleotide
  misc_feature 1..20: note = Target: ANGPTL4; (+) strand; PAM type: YTN; PAM sequence: TTC
  source 1..20: mol_type = other DNA
tattgtccaggctggtctca

SEQ ID NO: 18412 - DNA, 20 bp, synthetic construct
  misc_feature 1..20: note = Description of Artificial Sequence: Synthetic oligonucleotide
  misc_feature 1..20: note = Target: ANGPTL4; (+) strand; PAM type: YTN; PAM sequence: CTA
  source 1..20: mol_type = other DNA
ttgtccaggctggtctcaaa

SEQ ID NO: 18413 - DNA, 20 bp, synthetic construct
  misc_feature 1..20: note = Description of Artificial Sequence: Synthetic oligonucleotide
  misc_feature 1..20: note = Target: ANGPTL4; (+) strand; PAM type: YTN; PAM sequence: TTG
  source 1..20: mol_type = other DNA
tccaggctggtctcaaacac

SEQ ID NO: 18414 - DNA, 20 bp, synthetic construct
  misc_feature 1..20: note = Description of Artificial Sequence: Synthetic oligonucleotide
  misc_feature 1..20: note = Target: ANGPTL4; (+) strand; PAM type: YTN; PAM sequence: CTG
  source 1..20: mol_type = other DNA
gtctcaaacaccgagactca

SEQ ID NO: 18415 - DNA, 20 bp, synthetic construct
  misc_feature 1..20: note = Description of Artificial Sequence: Synthetic oligonucleotide
  misc_feature 1..20: note = Target: ANGPTL4; (+) strand; PAM type: YTN; PAM sequence: CTC
  source 1..20: mol_type = other DNA
aaacaccgagactcaaggga

SEQ ID NO: 18416 - DNA, 20 bp, synthetic construct
  misc_feature 1..20: note = Description of Artificial Sequence: Synthetic oligonucleotide
  misc_feature 1..20: note = Target: ANGPTL4; (+) strand; PAM type: YTN; PAM sequence: CTC
  source 1..20: mol_type = other DNA
aagggatcctcctgccttgg

SEQ ID NO: 18417 - DNA, 20 bp, synthetic construct
  misc_feature 1..20: note = Description of Artificial Sequence: Synthetic oligonucleotide
  misc_feature 1..20: note = Target: ANGPTL4; (+) strand; PAM type: YTN; PAM sequence: CTC
  source 1..20: mol_type = other DNA
ctgccttggcttcacaaagt

SEQ ID NO: 18418 - DNA, 20 bp, synthetic construct
  misc_feature 1..20: note = Description of Artificial Sequence: Synthetic oligonucleotide
  misc_feature 1..20: note = Target: ANGPTL4; (+) strand; PAM type: YTN; PAM sequence: CTG
  source 1..20: mol_type = other DNA
ccttggcttcacaaagtgat

SEQ ID NO: 18419 - DNA, 20 bp, synthetic construct
  misc_feature 1..20: note = Description of Artificial Sequence: Synthetic oligonucleotide
  misc_feature 1..20: note = Target: ANGPTL4; (+) strand; PAM type: YTN; PAM sequence: CTT
  source 1..20: mol_type = other DNA
ggcttcacaaagtgatggga

SEQ ID NO: 18420 - DNA, 20 bp, synthetic construct
  misc_feature 1..20: note = Description of Artificial Sequence: Synthetic oligonucleotide
  misc_feature 1..20: note = Target: ANGPTL4; (+) strand; PAM type: YTN; PAM sequence: TTG
  source 1..20: mol_type = other DNA
gcttcacaaagtgatgggat

SEQ ID NO: 18421 - DNA, 20 bp, synthetic construct
  misc_feature 1..20: note = Description of Artificial Sequence: Synthetic oligonucleotide
  misc_feature 1..20: note = Target: ANGPTL4; (+) strand; PAM type: YTN; PAM sequence: CTT
  source 1..20: mol_type = other DNA
cacaaagtgatgggattaaa

SEQ ID NO: 18422 - DNA, 20 bp, synthetic construct
  misc_feature 1..20: note = Description of Artificial Sequence: Synthetic oligonucleotide
  misc_feature 1..20: note = Target: ANGPTL4; (+) strand; PAM type: YTN; PAM sequence: TTC
  source 1..20: mol_type = other DNA
acaaagtgatgggattaaag

SEQ ID NO: 18423 - DNA, 20 bp, synthetic construct
  misc_feature 1..20: note = Description of Artificial Sequence: Synthetic oligonucleotide
  misc_feature 1..20: note = Target: ANGPTL4; (+) strand; PAM type: YTN; PAM sequence: TTA
  source 1..20: mol_type = other DNA
aaggtgtgagcgccactgca

SEQ ID NO: 18424 - DNA, 20 bp, synthetic construct
  misc_feature 1..20: note = Description of Artificial Sequence: Synthetic oligonucleotide
  misc_feature 1..20: note = Target: ANGPTL4; (+) strand; PAM type: YTN; PAM sequence: CTG
  source 1..20: mol_type = other DNA
cacccacccctgaaggctct

SEQ ID NO: 18425 - DNA, 20 bp, synthetic construct
  misc_feature 1..20: note = Description of Artificial Sequence: Synthetic oligonucleotide
  misc_feature 1..20: note = Target: ANGPTL4; (+) strand; PAM type: YTN; PAM sequence: CTG
  source 1..20: mol_type = other DNA
aaggctctaattctacatct

SEQ ID NO: 18426 - DNA, 20 bp, synthetic construct
  misc_feature 1..20: note = Description of Artificial Sequence: Synthetic oligonucleotide
  misc_feature 1..20: note = Target: ANGPTL4; (+) strand; PAM type: YTN; PAM sequence: CTC
  source 1..20: mol_type = other DNA
taattctacatctgtgtttt

SEQ ID NO: 18427 - DNA, 20 bp, synthetic construct
  misc_feature 1..20: note = Description of Artificial Sequence: Synthetic oligonucleotide
  misc_feature 1..20: note = Target: ANGPTL4; (+) strand; PAM type: YTN; PAM sequence: CTA
  source 1..20: mol_type = other DNA
attctacatctgtgttttgt

SEQ ID NO: 18428 - DNA, 20 bp, synthetic construct
  misc_feature 1..20: note = Description of Artificial Sequence: Synthetic oligonucleotide
  misc_feature 1..20: note = Target: ANGPTL4; (+) strand; PAM type: YTN; PAM sequence: TTC
  source 1..20: mol_type = other DNA
tacatctgtgttttgttaaa

SEQ ID NO: 18429 - DNA, 20 bp, synthetic construct
  misc_feature 1..20: note = Description of Artificial Sequence: Synthetic oligonucleotide
  misc_feature 1..20: note = Target: ANGPTL4; (+) strand; PAM type: YTN; PAM sequence: CTA
  source 1..20: mol_type = other DNA
catctgtgttttgttaaaaa

SEQ ID NO: 18430 - DNA, 20 bp, synthetic construct
  misc_feature 1..20: note = Description of Artificial Sequence: Synthetic oligonucleotide
  misc_feature 1..20: note = Target: ANGPTL4; (+) strand; PAM type: YTN; PAM sequence: CTG
  source 1..20: mol_type = other DNA
tgttttgttaaaaaaaaaaa

SEQ ID NO: 18431 - DNA, 20 bp, synthetic construct
  misc_feature 1..20: note = Description of Artificial Sequence: Synthetic oligonucleotide
  misc_feature 1..20: note = Target: ANGPTL4; (+) strand; PAM type: YTN; PAM sequence: TTT
  source 1..20: mol_type = other DNA
tgttaaaaaaaaaaaaaaaa

SEQ ID NO: 18432 - DNA, 20 bp, synthetic construct
  misc_feature 1..20: note = Description of Artificial Sequence: Synthetic oligonucleotide
  misc_feature 1..20: note = Target: ANGPTL4; (+) strand; PAM type: YTN; PAM sequence: TTT
  source 1..20: mol_type = other DNA
gttaaaaaaaaaaaaaaaag

SEQ ID NO: 18433 - DNA, 20 bp, synthetic construct
  misc_feature 1..20: note = Description of Artificial Sequence: Synthetic oligonucleotide
  misc_feature 1..20: note = Target: ANGPTL4; (+) strand; PAM type: YTN; PAM sequence: TTG
  source 1..20: mol_type = other DNA
ttaaaaaaaaaaaaaaaaga

SEQ ID NO: 18434 - DNA, 20 bp, synthetic construct
  misc_feature 1..20: note = Description of Artificial Sequence: Synthetic oligonucleotide
  misc_feature 1..20: note = Target: ANGPTL4; (+) strand; PAM type: YTN; PAM sequence: TTA
  source 1..20: mol_type = other DNA
aaaaaaaaaaaaaaagatgg

SEQ ID NO: 18435 - DNA, 20 bp, synthetic construct
  misc_feature 1..20: note = Description of Artificial Sequence: Synthetic oligonucleotide
  misc_feature 1..20: note = Target: ANGPTL4; (+) strand; PAM type: YTN; PAM sequence: CTC
  source 1..20: mol_type = other DNA
atgcctgtaatcccagcact

SEQ ID NO: 18436 - DNA, 20 bp, synthetic construct
  misc_feature 1..20: note = Description of Artificial Sequence: Synthetic oligonucleotide
  misc_feature 1..20: note = Target: ANGPTL4; (+) strand; PAM type: YTN; PAM sequence: CTG
  source 1..20: mol_type = other DNA
taatcccagcactttaggag

SEQ ID NO: 18437 - DNA, 20 bp, synthetic construct
  misc_feature 1..20: note = Description of Artificial Sequence: Synthetic oligonucleotide
  misc_feature 1..20: note = Target: ANGPTL4; (+) strand; PAM type: YTN; PAM sequence: CTT
  source 1..20: mol_type = other DNA
taggaggccgaggcaggtgg

SEQ ID NO: 18438 - DNA, 20 bp, synthetic construct
  misc_feature 1..20: note = Description of Artificial Sequence: Synthetic oligonucleotide
  misc_feature 1..20: note = Target: ANGPTL4; (+) strand; PAM type: YTN; PAM sequence: TTT
  source 1..20: mol_type = other DNA
aggaggccgaggcaggtgga

SEQ ID NO: 18439 - DNA, 20 bp, synthetic construct
  misc_feature 1..20: note = Description of Artificial Sequence: Synthetic oligonucleotide
  misc_feature 1..20: note = Target: ANGPTL4; (+) strand; PAM type: YTN; PAM sequence: TTA
  source 1..20: mol_type = other DNA
ggaggccgaggcaggtggat

SEQ ID NO: 18440 - DNA, 20 bp, synthetic construct
  misc_feature 1..20: note = Description of Artificial Sequence: Synthetic oligonucleotide
  misc_feature 1..20: note = Target: ANGPTL4; (+) strand; PAM type: YTN; PAM sequence: CTG
  source 1..20: mol_type = other DNA
acattacgagttccaggccc

SEQ ID NO: 18441 - DNA, 20 bp, synthetic construct
  misc_feature 1..20: note = Description of Artificial Sequence: Synthetic oligonucleotide
  misc_feature 1..20: note = Target: ANGPTL4; (+) strand; PAM type: YTN; PAM sequence: TTA
  source 1..20: mol_type = other DNA
cgagttccaggcccgcctga

SEQ ID NO: 18442 - DNA, 20 bp, synthetic construct
  misc_feature 1..20: note = Description of Artificial Sequence: Synthetic oligonucleotide
  misc_feature 1..20: note = Target: ANGPTL4; (+) strand; PAM type: YTN; PAM sequence: TTC
  source 1..20: mol_type = other DNA
caggcccgcctgaccaacat

SEQ ID NO: 18443 - DNA, 20 bp, synthetic construct
  misc_feature 1..20: note = Description of Artificial Sequence: Synthetic oligonucleotide
  misc_feature 1..20: note = Target: ANGPTL4; (+) strand; PAM type: YTN; PAM sequence: CTG
  source 1..20: mol_type = other DNA
accaacatggtgaaaccccg

SEQ ID NO: 18444 - DNA, 20 bp, synthetic construct
  misc_feature 1..20: note = Description of Artificial Sequence: Synthetic oligonucleotide
  misc_feature 1..20: note = Target: ANGPTL4; (+) strand; PAM type: YTN; PAM sequence: CTC
  source 1..20: mol_type = other DNA
tactaaaaatacaaaaatta

SEQ ID NO: 18445 - DNA, 20 bp, synthetic construct
  misc_feature 1..20: note = Description of Artificial Sequence: Synthetic oligonucleotide
  misc_feature 1..20: note = Target: ANGPTL4; (+) strand; PAM type: YTN; PAM sequence: CTA
  source 1..20: mol_type = other DNA
ctaaaaatacaaaaattagc

SEQ ID NO: 18446 - DNA, 20 bp, synthetic construct
  misc_feature 1..20: note = Description of Artificial Sequence: Synthetic oligonucleotide
  misc_feature 1..20: note = Target: ANGPTL4; (+) strand; PAM type: YTN; PAM sequence: CTA
  source 1..20: mol_type = other DNA
aaaatacaaaaattagccgg

SEQ ID NO: 18447 - DNA, 20 bp, synthetic construct
  misc_feature 1..20: note = Description of Artificial Sequence: Synthetic oligonucleotide
  misc_feature 1..20: note = Target: ANGPTL4; (+) strand; PAM type: YTN; PAM sequence: TTA
  source 1..20: mol_type = other DNA
gccgggtgtggtggcgggtg

SEQ ID NO: 18448 - DNA, 20 bp, synthetic construct
  misc_feature 1..20: note = Description of Artificial Sequence: Synthetic oligonucleotide
  misc_feature 1..20: note = Target: ANGPTL4; (+) strand; PAM type: YTN; PAM sequence: CTG
  source 1..20: mol_type = other DNA
taatcccagctactcaggag

SEQ ID NO: 18449 - DNA, 20 bp, synthetic construct
  misc_feature 1..20: note = Description of Artificial Sequence: Synthetic oligonucleotide
  misc_feature 1..20: note = Target: ANGPTL4; (+) strand; PAM type: YTN; PAM sequence: CTA
  source 1..20: mol_type = other DNA
ctcaggaggctgaggcagga

SEQ ID NO: 18450 - DNA, 20 bp, synthetic construct
  misc_feature 1..20: note = Description of Artificial Sequence: Synthetic oligonucleotide
  misc_feature 1..20: note = Target: ANGPTL4; (+) strand; PAM type: YTN; PAM sequence: CTC
  source 1..20: mol_type = other DNA
aggaggctgaggcaggagaa

SEQ ID NO: 18451 - DNA, 20 bp, synthetic construct
  misc_feature 1..20: note = Description of Artificial Sequence: Synthetic oligonucleotide
  misc_feature 1..20: note = Target: ANGPTL4; (+) strand; PAM type: YTN; PAM sequence: CTG
  source 1..20: mol_type = other DNA
aggcaggagaatcacttgaa

SEQ ID NO: 18452 - DNA, 20 bp, synthetic construct
  misc_feature 1..20: note = Description of Artificial Sequence: Synthetic oligonucleotide
  misc_feature 1..20: note = Target: ANGPTL4; (+) strand; PAM type: YTN; PAM sequence: CTT
  source 1..20: mol_type = other DNA
gaactcgggaggtggaggtt

SEQ ID NO: 18453 - DNA, 20 bp, synthetic construct
  misc_feature 1..20: note = Description of Artificial Sequence: Synthetic oligonucleotide
  misc_feature 1..20: note = Target: ANGPTL4; (+) strand; PAM type: YTN; PAM sequence: TTG
  source 1..20: mol_type = other DNA
aactcgggaggtggaggttg

SEQ ID NO: 18454 - DNA, 20 bp, synthetic construct
  misc_feature 1..20: note = Description of Artificial Sequence: Synthetic oligonucleotide
  misc_feature 1..20: note = Target: ANGPTL4; (+) strand; PAM type: YTN; PAM sequence: CTC
  source 1..20: mol_type = other DNA
gggaggtggaggttgcggtg

SEQ ID NO: 18455 - DNA, 20 bp, synthetic construct
  misc_feature 1..20: note = Description of Artificial Sequence: Synthetic oligonucleotide
  misc_feature 1..20: note = Target: ANGPTL4; (+) strand; PAM type: YTN; PAM sequence: TTG
  source 1..20: mol_type = other DNA
cggtgagcagagatcatgcc

SEQ ID NO: 18456 - DNA, 20 bp, synthetic construct
  misc_feature 1..20: note = Description of Artificial Sequence: Synthetic oligonucleotide
  misc_feature 1..20: note = Target: ANGPTL4; (+) strand; PAM type: YTN; PAM sequence: CTG
  source 1..20: mol_type = other DNA
cactccagcctgggtgacag

SEQ ID NO: 18457 - DNA, 20 bp, synthetic construct
  misc_feature 1..20: note = Description of Artificial Sequence: Synthetic oligonucleotide
  misc_feature 1..20: note = Target: ANGPTL4; (+) strand; PAM type: YTN; PAM sequence: CTC
  source 1..20: mol_type = other DNA
cagcctgggtgacagagcaa

SEQ ID NO: 18458 - DNA, 20 bp, synthetic construct
  misc_feature 1..20: note = Description of Artificial Sequence: Synthetic oligonucleotide
  misc_feature 1..20: note = Target: ANGPTL4; (+) strand; PAM type: YTN; PAM sequence: CTG
  source 1..20: mol_type = other DNA
ggtgacagagcaagacttga

SEQ ID NO: 18459 - DNA, 20 bp, synthetic construct
  misc_feature 1..20: note = Description of Artificial Sequence: Synthetic oligonucleotide
  misc_feature 1..20: note = Target: ANGPTL4; (+) strand; PAM type: YTN; PAM sequence: CTT
  source 1..20: mol_type = other DNA
gatttcaaaaaaaaaaaaaa

SEQ ID NO: 18460 - DNA, 20 bp, synthetic construct
  misc_feature 1..20: note = Description of Artificial Sequence: Synthetic oligonucleotide
  misc_feature 1..20: note = Target: ANGPTL4; (+) strand; PAM type: YTN; PAM sequence: TTG
  source 1..20: mol_type = other DNA
atttcaaaaaaaaaaaaaaa

SEQ ID NO: 18461 - DNA, 20 bp, synthetic construct
  misc_feature 1..20: note = Description of Artificial Sequence: Synthetic oligonucleotide
  misc_feature 1..20: note = Target: ANGPTL4; (+) strand; PAM type: YTN; PAM sequence: TTT
  source 1..20: mol_type = other DNA
caaaaaaaaaaaaaaaaaaa

SEQ ID NO: 18462 - DNA, 20 bp, synthetic construct
  misc_feature 1..20: note = Description of Artificial Sequence: Synthetic oligonucleotide
  misc_feature 1..20: note = Target: ANGPTL4; (+) strand; PAM type: YTN; PAM sequence: TTC
  source 1..20: mol_type = other DNA
aaaaaaaaaaaaaaaaaaaa

SEQ ID NO: 18463 - DNA, 20 bp, synthetic construct
  misc_feature 1..20: note = Description of Artificial Sequence: Synthetic oligonucleotide
  misc_feature 1..20: note = Target: ANGPTL4; (+) strand; PAM type: YTN; PAM sequence: CTG
  source 1..20: mol_type = other DNA
ggcgcattggctcacacttg

SEQ ID NO: 18464 - DNA, 20 bp, synthetic construct
  misc_feature 1..20: note = Description of Artificial Sequence: Synthetic oligonucleotide
  misc_feature 1..20: note = Target: ANGPTL4; (+) strand; PAM type: YTN; PAM sequence: TTG
  source 1..20: mol_type = other DNA
gctcacacttgtaacactag

SEQ ID NO: 18465 - DNA, 20 bp, synthetic construct
  misc_feature 1..20: note = Description of Artificial Sequence: Synthetic oligonucleotide
  misc_feature 1..20: note = Target: ANGPTL4; (+) strand; PAM type: YTN; PAM sequence: CTC
  source 1..20: mol_type = other DNA
acacttgtaacactagcact

SEQ ID NO: 18466 - DNA, 20 bp, synthetic construct
  misc_feature 1..20: note = Description of Artificial Sequence: Synthetic oligonucleotide
  misc_feature 1..20: note = Target: ANGPTL4; (+) strand; PAM type: YTN; PAM sequence: CTT
  source 1..20: mol_type = other DNA
gtaacactagcactttggga

SEQ ID NO: 18467 - DNA, 20 bp, synthetic construct
  misc_feature 1..20: note = Description of Artificial Sequence: Synthetic oligonucleotide
  misc_feature 1..20: note = Target: ANGPTL4; (+) strand; PAM type: YTN; PAM sequence: TTG
  source 1..20: mol_type = other DNA
taacactagcactttgggag

SEQ ID NO: 18468 - DNA, 20 bp, synthetic construct
  misc_feature 1..20: note = Description of Artificial Sequence: Synthetic oligonucleotide
  misc_feature 1..20: note = Target: ANGPTL4; (+) strand; PAM type: YTN; PAM sequence: CTA
  source 1..20: mol_type = other DNA
gcactttgggaggccaacga

SEQ ID NO: 18469 - DNA, 20 bp, synthetic construct
  misc_feature 1..20: note = Description of Artificial Sequence: Synthetic oligonucleotide
  misc_feature 1..20: note = Target: ANGPTL4; (+) strand; PAM type: YTN; PAM sequence: CTT
  source 1..20: mol_type = other DNA
tgggaggccaacgagcggat

SEQ ID NO: 18470 - DNA, 20 bp, synthetic construct
  misc_feature 1..20: note = Description of Artificial Sequence: Synthetic oligonucleotide
  misc_feature 1..20: note = Target: ANGPTL4; (+) strand; PAM type: YTN; PAM sequence: TTT
  source 1..20: mol_type = other DNA
gggaggccaacgagcggatc

SEQ ID NO: 18471 - DNA, 20 bp, synthetic construct
  misc_feature 1..20: note = Description of Artificial Sequence: Synthetic oligonucleotide
  misc_feature 1..20: note = Target: ANGPTL4; (+) strand; PAM type: YTN; PAM sequence: TTG
  source 1..20: mol_type = other DNA
ggaggccaacgagcggatca

SEQ ID NO: 18472 - DNA, 20 bp, synthetic construct
  misc_feature 1..20: note = Description of Artificial Sequence: Synthetic oligonucleotide
  misc_feature 1..20: note = Target: ANGPTL4; (+) strand; PAM type: YTN; PAM sequence: CTG
  source 1..20: mol_type = other DNA
tattgctctatatagtgaga

SEQ ID NO: 18473 - DNA, 20 bp, synthetic construct
  misc_feature 1..20: note = Description of Artificial Sequence: Synthetic oligonucleotide
  misc_feature 1..20: note = Target: ANGPTL4; (+) strand; PAM type: YTN; PAM sequence: TTG
  source 1..20: mol_type = other DNA
ctctatatagtgagatccct

SEQ ID NO: 18474 - DNA, 20 bp, synthetic construct
  misc_feature 1..20: note = Description of Artificial Sequence: Synthetic oligonucleotide
  misc_feature 1..20: note = Target: ANGPTL4; (+) strand; PAM type: YTN; PAM sequence: CTC
  source 1..20: mol_type = other DNA
tatatagtgagatccctata

SEQ ID NO: 18475 - DNA, 20 bp, synthetic construct
  misc_feature 1..20: note = Description of Artificial Sequence: Synthetic oligonucleotide
  misc_feature 1..20: note = Target: ANGPTL4; (+) strand; PAM type: YTN; PAM sequence: CTA
  source 1..20: mol_type = other DNA
tatagtgagatccctatata

SEQ ID NO: 18476 - DNA, 20 bp, synthetic construct
  misc_feature 1..20: note = Description of Artificial Sequence: Synthetic oligonucleotide
  misc_feature 1..20: note = Target: ANGPTL4; (+) strand; PAM type: YTN; PAM sequence: CTA
  source 1..20: mol_type = other DNA
tatagggtctcactctattg

SEQ ID NO: 18477 - DNA, 20 bp, synthetic construct
  misc_feature 1..20: note = Description of Artificial Sequence: Synthetic oligonucleotide
  misc_feature 1..20: note = Target: ANGPTL4; (+) strand; PAM type: YTN; PAM sequence: CTC
  source 1..20: mol_type = other DNA
actctattgtccaggctggt

SEQ ID NO: 18478 - DNA, 20 bp, synthetic construct
  misc_feature 1..20: note = Description of Artificial Sequence: Synthetic oligonucleotide
  misc_feature 1..20: note = Target: ANGPTL4; (+) strand; PAM type: YTN; PAM sequence: CTC
  source 1..20: mol_type = other DNA
tattgtccaggctggtctgg

SEQ ID NO: 18479 - DNA, 20 bp, synthetic construct
  misc_feature 1..20: note = Description of Artificial Sequence: Synthetic oligonucleotide
  misc_feature 1..20: note = Target: ANGPTL4; (+) strand; PAM type: YTN; PAM sequence: CTA
  source 1..20: mol_type = other DNA
ttgtccaggctggtctggcc

SEQ ID NO: 18480 - DNA, 20 bp, synthetic construct
  misc_feature 1..20: note = Description of Artificial Sequence: Synthetic oligonucleotide
  misc_feature 1..20: note = Target: ANGPTL4; (+) strand; PAM type: YTN; PAM sequence: TTG
  source 1..20: mol_type = other DNA
tccaggctggtctggcctgg

SEQ ID NO: 18481 - DNA, 20 bp, synthetic construct
  misc_feature 1..20: note = Description of Artificial Sequence: Synthetic oligonucleotide
  misc_feature 1..20: note = Target: ANGPTL4; (+) strand; PAM type: YTN; PAM sequence: CTG
  source 1..20: mol_type = other DNA
gtctggcctggccaatgtgg

SEQ ID NO: 18482 - DNA, 20 bp, synthetic construct
  misc_feature 1..20: note = Description of Artificial Sequence: Synthetic oligonucleotide
  misc_feature 1..20: note = Target: ANGPTL4; (+) strand; PAM type: YTN; PAM sequence: CTG
  source 1..20: mol_type = other DNA
gcctggccaatgtggtgaaa

SEQ ID NO: 18483 - DNA, 20 bp, synthetic construct
  misc_feature 1..20: note = Description of Artificial Sequence: Synthetic oligonucleotide
  misc_feature 1..20: note = Target: ANGPTL4; (+) strand; PAM type: YTN; PAM sequence: CTG
  source 1..20: mol_type = other DNA
gccaatgtggtgaaacctca

SEQ ID NO: 18484 - DNA, 20 bp, synthetic construct
  misc_feature 1..20: note = Description of Artificial Sequence: Synthetic oligonucleotide
  misc_feature 1..20: note = Target: ANGPTL4; (+) strand; PAM type: YTN; PAM sequence: CTC
  source 1..20: mol_type = other DNA
atttctactaaaaatacaaa

SEQ ID NO: 18485 - DNA, 20 bp, synthetic construct
  misc_feature 1..20: note = Description of Artificial Sequence: Synthetic oligonucleotide
  misc_feature 1..20: note = Target: ANGPTL4; (+) strand; PAM type: YTN; PAM sequence: TTT
  source 1..20: mol_type = other DNA
ctactaaaaatacaaaaatt

SEQ ID NO: 18486 - DNA, 20 bp, synthetic construct
  misc_feature 1..20: note = Description of Artificial Sequence: Synthetic oligonucleotide
  misc_feature 1..20: note = Target: ANGPTL4; (+) strand; PAM type: YTN; PAM sequence: TTC
  source 1..20: mol_type = other DNA
tactaaaaatacaaaaatta

SEQ ID NO: 18487 - DNA, 20 bp, synthetic construct
  misc_feature 1..20: note = Description of Artificial Sequence: Synthetic oligonucleotide
  misc_feature 1..20: note = Target: ANGPTL4; (+) strand; PAM type: YTN; PAM sequence: CTA
  source 1..20: mol_type = other DNA
ctaaaaatacaaaaattagc

SEQ ID NO: 18488 - DNA, 20 bp, synthetic construct
  misc_feature 1..20: note = Description of Artificial Sequence: Synthetic oligonucleotide
  misc_feature 1..20: note = Target: ANGPTL4; (+) strand; PAM type: YTN; PAM sequence: CTA
  source 1..20: mol_type = other DNA
aaaatacaaaaattagctgg

SEQ ID NO: 18489 - DNA, 20 bp, synthetic construct
  misc_feature 1..20: note = Description of Artificial Sequence: Synthetic oligonucleotide
  misc_feature 1..20: note = Target: ANGPTL4; (+) strand; PAM type: YTN; PAM sequence: TTA
  source 1..20: mol_type = other DNA
gctgggcatagtgatgcgca

SEQ ID NO: 18490 - DNA, 20 bp, synthetic construct
  misc_feature 1..20: note = Description of Artificial Sequence: Synthetic oligonucleotide
  misc_feature 1..20: note = Target: ANGPTL4; (+) strand; PAM type: YTN; PAM sequence: CTG
  source 1..20: mol_type = other DNA
ggcatagtgatgcgcaccta

SEQ ID NO: 18491 - DNA, 20 bp, synthetic construct
  misc_feature 1..20: note = Description of Artificial Sequence: Synthetic oligonucleotide
  misc_feature 1..20: note = Target: ANGPTL4; (+) strand; PAM type: YTN; PAM sequence: CTA
  source 1..20: mol_type = other DNA
taatcccagctactcaggag

SEQ ID NO: 18492 - DNA, 20 bp, synthetic construct
  misc_feature 1..20: note = Description of Artificial Sequence: Synthetic oligonucleotide
  misc_feature 1..20: note = Target: ANGPTL4; (+) strand; PAM type: YTN; PAM sequence: CTA
  source 1..20: mol_type = other DNA
ctcaggaggctgaggccgga

SEQ ID NO: 18493 - DNA, 20 bp, synthetic construct
  misc_feature 1..20: note = Description of Artificial Sequence: Synthetic oligonucleotide
  misc_feature 1..20: note = Target: ANGPTL4; (+) strand; PAM type: YTN; PAM sequence: CTC
  source 1..20: mol_type = other DNA
aggaggctgaggccggagaa

SEQ ID NO: 18494 - DNA, 20 bp, synthetic construct
  misc_feature 1..20: note = Description of Artificial Sequence: Synthetic oligonucleotide
  misc_feature 1..20: note = Target: ANGPTL4; (+) strand; PAM type: YTN; PAM sequence: CTG
  source 1..20: mol_type = other DNA
aggccggagaattgcttgaa

SEQ ID NO: 18495 - DNA, 20 bp, synthetic construct
  misc_feature 1..20: note = Description of Artificial Sequence: Synthetic oligonucleotide
  misc_feature 1..20: note = Target: ANGPTL4; (+) strand; PAM type: YTN; PAM sequence: TTG
  source 1..20: mol_type = other DNA
cttgaacccaggaggtggag

SEQ ID NO: 18496 - DNA, 20 bp, synthetic construct
  misc_feature 1..20: note = Description of Artificial Sequence: Synthetic oligonucleotide
  misc_feature 1..20: note = Target: ANGPTL4; (+) strand; PAM type: YTN; PAM sequence: CTT
  source 1..20: mol_type = other DNA
gaacccaggaggtggaggtt

SEQ ID NO: 18497 - DNA, 20 bp, synthetic construct
  misc_feature 1..20: note = Description of Artificial Sequence: Synthetic oligonucleotide
  misc_feature 1..20: note = Target: ANGPTL4; (+) strand; PAM type: YTN; PAM sequence: TTG
  source 1..20: mol_type = other DNA
aacccaggaggtggaggttg

SEQ ID NO: 18498 - DNA, 20 bp, synthetic construct
  misc_feature 1..20: note = Description of Artificial Sequence: Synthetic oligonucleotide
  misc_feature 1..20: note = Target: ANGPTL4; (+) strand; PAM type: YTN; PAM sequence: TTG
  source 1..20: mol_type = other DNA
cagtgagccgagatggcgct

SEQ ID NO: 18499 - DNA, 20 bp, synthetic construct
  misc_feature 1..20: note = Description of Artificial Sequence: Synthetic oligonucleotide
  misc_feature 1..20: note = Target: ANGPTL4; (+) strand; PAM type: YTN; PAM sequence: CTG
  source 1..20: mol_type = other DNA
agaggtgacagcgtgctggc

SEQ ID NO: 18500 - DNA, 20 bp, synthetic construct
  misc_feature 1..20: note = Description of Artificial Sequence: Synthetic oligonucleotide
  misc_feature 1..20: note = Target: ANGPTL4; (+) strand; PAM type: YTN; PAM sequence: CTG
  source 1..20: mol_type = other DNA
gcagtcctcacagccctcgc

SEQ ID NO: 18501 - DNA, 20 bp, synthetic construct
  misc_feature 1..20: note = Description of Artificial Sequence: Synthetic oligonucleotide
  misc_feature 1..20: note = Target: ANGPTL4; (+) strand; PAM type: YTN; PAM sequence: CTC
  source 1..20: mol_type = other DNA
acagccctcgctcactctct

SEQ ID NO: 18502 - DNA, 20 bp, synthetic construct
  misc_feature 1..20: note = Description of Artificial Sequence: Synthetic oligonucleotide
  misc_feature 1..20: note = Target: ANGPTL4; (+) strand; PAM type: YTN; PAM sequence: CTC
  source 1..20: mol_type = other DNA
gctcactctctgcgactcct

SEQ ID NO: 18503 - DNA, 20 bp, synthetic construct
  misc_feature 1..20: note = Description of Artificial Sequence: Synthetic oligonucleotide
  misc_feature 1..20: note = Target: ANGPTL4; (+) strand; PAM type: YTN; PAM sequence: CTC
  source 1..20: mol_type = other DNA
actctctgcgactcctctgc

SEQ ID NO: 18504 - DNA, 20 bp, synthetic construct
  misc_feature 1..20: note = Description of Artificial Sequence: Synthetic oligonucleotide
  misc_feature 1..20: note = Target: ANGPTL4; (+) strand; PAM type: YTN; PAM sequence: CTC
  source 1..20: mol_type = other DNA
tctgcgactcctctgcctgg

SEQ ID NO: 18505 - DNA, 20 bp, synthetic construct
  misc_feature 1..20: note = Description of Artificial Sequence: Synthetic oligonucleotide
  misc_feature 1..20: note = Target: ANGPTL4; (+) strand; PAM type: YTN; PAM sequence: CTC
  source 1..20: mol_type = other DNA
tgcgactcctctgcctgggc

SEQ ID NO: 18506 - DNA, 20 bp, synthetic construct
  misc_feature 1..20: note = Description of Artificial Sequence: Synthetic oligonucleotide
  misc_feature 1..20: note = Target: ANGPTL4; (+) strand; PAM type: YTN; PAM sequence: CTG
  source 1..20: mol_type = other DNA
cgactcctctgcctgggctc

SEQ ID NO: 18507 - DNA, 20 bp, synthetic construct
  misc_feature 1..20: note = Description of Artificial Sequence: Synthetic oligonucleotide
  misc_feature 1..20: note = Target: ANGPTL4; (+) strand; PAM type: YTN; PAM sequence: CTC
  source 1..20: mol_type = other DNA
ctctgcctgggctcccactg

SEQ ID NO: 18508 - DNA, 20 bp, synthetic construct
  misc_feature 1..20: note = Description of Artificial Sequence: Synthetic oligonucleotide
  misc_feature 1..20: note = Target: ANGPTL4; (+) strand; PAM type: YTN; PAM sequence: CTC
  source 1..20: mol_type = other DNA
tgcctgggctcccactgtgg

SEQ ID NO: 18509 - DNA, 20 bp, synthetic construct
  misc_feature 1..20: note = Description of Artificial Sequence: Synthetic oligonucleotide
  misc_feature 1..20: note = Target: ANGPTL4; (+) strand; PAM type: YTN; PAM sequence: CTG
  source 1..20: mol_type = other DNA
cctgggctcccactgtggcg

SEQ ID NO: 18510 - DNA, 20 bp, synthetic construct
  misc_feature 1..20: note = Description of Artificial Sequence: Synthetic oligonucleotide
  misc_feature 1..20: note = Target: ANGPTL4; (+) strand; PAM type: YTN; PAM sequence: CTG
  source 1..20: mol_type = other DNA
ggctcccactgtggcggcac

SEQ ID NO: 18511 - DNA, 20 bp, synthetic construct
  misc_feature 1..20: note = Description of Artificial Sequence: Synthetic oligonucleotide
  misc_feature 1..20: note = Target: ANGPTL4; (+) strand; PAM type: YTN; PAM sequence: CTC
  source 1..20: mol_type = other DNA
ccactgtggcggcacttcag

SEQ ID NO: 18512 - DNA, 20 bp, synthetic construct
  misc_feature 1..20: note = Description of Artificial Sequence: Synthetic oligonucleotide
  misc_feature 1..20: note = Target: ANGPTL4; (+) strand; PAM type: YTN; PAM sequence: CTG
  source 1..20: mol_type = other DNA
tggcggcacttcaggagccc

SEQ ID NO: 18513 - DNA, 20 bp, synthetic construct
  misc_feature 1..20: note = Description of Artificial Sequence: Synthetic oligonucleotide
  misc_feature 1..20: note = Target: ANGPTL4; (+) strand; PAM type: YTN; PAM sequence: CTT
  source 1..20: mol_type = other DNA
caggagcccttcagcccacc

SEQ ID NO: 18514 - DNA, 20 bp, synthetic construct
  misc_feature 1..20: note = Description of Artificial Sequence: Synthetic oligonucleotide
  misc_feature 1..20: note = Target: ANGPTL4; (+) strand; PAM type: YTN; PAM sequence: TTC
  source 1..20: mol_type = other DNA
aggagcccttcagcccaccg

SEQ ID NO: 18515 - DNA, 20 bp, synthetic construct
  misc_feature 1..20: note = Description of Artificial Sequence: Synthetic oligonucleotide
  misc_feature 1..20: note = Target: ANGPTL4; (+) strand; PAM type: YTN; PAM sequence: CTT
  source 1..20: mol_type = other DNA
cagcccaccgctgcactgtg

SEQ ID NO: 18516 - DNA, 20 bp, synthetic construct
  misc_feature 1..20: note = Description of Artificial Sequence: Synthetic oligonucleotide
  misc_feature 1..20: note = Target: ANGPTL4; (+) strand; PAM type: YTN; PAM sequence: TTC
  source 1..20: mol_type = other DNA
agcccaccgctgcactgtgg

SEQ ID NO: 18517 - DNA, 20 bp, synthetic construct
  misc_feature 1..20: note = Description of Artificial Sequence: Synthetic oligonucleotide
  misc_feature 1..20: note = Target: ANGPTL4; (+) strand; PAM type: YTN; PAM sequence: CTG
  source 1..20: mol_type = other DNA
cactgtgggagcccctttct

SEQ ID NO: 18518 - DNA, 20 bp, synthetic construct
  misc_feature 1..20: note = Description of Artificial Sequence: Synthetic oligonucleotide
  misc_feature 1..20: note = Target: ANGPTL4; (+) strand; PAM type: YTN; PAM sequence: CTG
  source 1..20: mol_type = other DNA
tgggagcccctttctgggct

SEQ ID NO: 18519 - DNA, 20 bp, synthetic construct
  misc_feature 1..20: note = Description of Artificial Sequence: Synthetic oligonucleotide
  misc_feature 1..20: note = Target: ANGPTL4; (+) strand; PAM type: YTN; PAM sequence: CTT
  source 1..20: mol_type = other DNA
tctgggctggccaaggccgg

SEQ ID NO: 18520 - DNA, 20 bp, synthetic construct
  misc_feature 1..20: note = Description of Artificial Sequence: Synthetic oligonucleotide
  misc_feature 1..20: note = Target: ANGPTL4; (+) strand; PAM type: YTN; PAM sequence: TTT
  source 1..20: mol_type = other DNA
ctgggctggccaaggccgga

SEQ ID NO: 18521 - DNA, 20 bp, synthetic construct
  misc_feature 1..20: note = Description of Artificial Sequence: Synthetic oligonucleotide
  misc_feature 1..20: note = Target: ANGPTL4; (+) strand; PAM type: YTN; PAM sequence: TTC
  source 1..20: mol_type = other DNA
tgggctggccaaggccggag

SEQ ID NO: 18522 - DNA, 20 bp, synthetic construct
  misc_feature 1..20: note = Description of Artificial Sequence: Synthetic oligonucleotide
  misc_feature 1..20: note = Target: ANGPTL4; (+) strand; PAM type: YTN; PAM sequence: CTG
  source 1..20: mol_type = other DNA
ggctggccaaggccggagct

SEQ ID NO: 18523 - DNA, 20 bp, synthetic construct
  misc_feature 1..20: note = Description of Artificial Sequence: Synthetic oligonucleotide
  misc_feature 1..20: note = Target: ANGPTL4; (+) strand; PAM type: YTN; PAM sequence: CTG
  source 1..20: mol_type = other DNA
gccaaggccggagctggctc

SEQ ID NO: 18524 - DNA, 20 bp, synthetic construct
  misc_feature 1..20: note = Description of Artificial Sequence: Synthetic oligonucleotide
  misc_feature 1..20: note = Target: ANGPTL4; (+) strand; PAM type: YTN; PAM sequence: CTG
  source 1..20: mol_type = other DNA
gctccctcagcttgcaggga

SEQ ID NO: 18525 - DNA, 20 bp, synthetic construct
  misc_feature 1..20: note = Description of Artificial Sequence: Synthetic oligonucleotide
  misc_feature 1..20: note = Target: ANGPTL4; (+) strand; PAM type: YTN; PAM sequence: CTC
  source 1..20: mol_type = other DNA
cctcagcttgcagggaagtg

SEQ ID NO: 18526 - DNA, 20 bp, synthetic construct
  misc_feature 1..20: note = Description of Artificial Sequence: Synthetic oligonucleotide
  misc_feature 1..20: note = Target: ANGPTL4; (+) strand; PAM type: YTN; PAM sequence: CTC
  source 1..20: mol_type = other DNA
agcttgcagggaagtgtgga

SEQ ID NO: 18527 - DNA, 20 bp, synthetic construct
  misc_feature 1..20: note = Description of Artificial Sequence: Synthetic oligonucleotide
  misc_feature 1..20: note = Target: ANGPTL4; (+) strand; PAM type: YTN; PAM sequence: CTT
  source 1..20: mol_type = other DNA
gcagggaagtgtggagggag

SEQ ID NO: 18528 - DNA, 20 bp, synthetic construct
  misc_feature 1..20: note = Description of Artificial Sequence: Synthetic oligonucleotide
  misc_feature 1..20: note = Target: ANGPTL4; (+) strand; PAM type: YTN; PAM sequence: TTG
  source 1..20: mol_type = other DNA
cagggaagtgtggagggaga

SEQ ID NO: 18529 - DNA, 20 bp, synthetic construct
  misc_feature 1..20: note = Description of Artificial Sequence: Synthetic oligonucleotide
  misc_feature 1..20: note = Target: ANGPTL4; (+) strand; PAM type: YTN; PAM sequence: CTG
  source 1..20: mol_type = other DNA
cgcgcggtgcttgtgggcca

SEQ ID NO: 18530 - DNA, 20 bp, synthetic construct
  misc_feature 1..20: note = Description of Artificial Sequence: Synthetic oligonucleotide
  misc_feature 1..20: note = Target: ANGPTL4; (+) strand; PAM type: YTN; PAM sequence: CTT
  source 1..20: mol_type = other DNA
gtgggccagctggagttccg

SEQ ID NO: 18531 - DNA, 20 bp, synthetic construct
  misc_feature 1..20: note = Description of Artificial Sequence: Synthetic oligonucleotide
  misc_feature 1..20: note = Target: ANGPTL4; (+) strand; PAM type: YTN; PAM sequence: TTG
  source 1..20: mol_type = other DNA
tgggccagctggagttccgg

SEQ ID NO: 18532 - DNA, 20 bp, synthetic construct
  misc_feature 1..20: note = Description of Artificial Sequence: Synthetic oligonucleotide
  misc_feature 1..20: note = Target: ANGPTL4; (+) strand; PAM type: YTN; PAM sequence: CTG
  source 1..20: mol_type = other DNA
gagttccgggtgggcgtggg

SEQ ID NO: 18533 - DNA, 20 bp, synthetic construct
  misc_feature 1..20: note = Description of Artificial Sequence: Synthetic oligonucleotide
  misc_feature 1..20: note = Target: ANGPTL4; (+) strand; PAM type: YTN; PAM sequence: TTC
  source 1..20: mol_type = other DNA
cgggtgggcgtgggcttggc

SEQ ID NO: 18534 - DNA, 20 bp, synthetic construct
  misc_feature 1..20: note = Description of Artificial Sequence: Synthetic oligonucleotide
  misc_feature 1..20: note = Target: ANGPTL4; (+) strand; PAM type: YTN; PAM sequence: CTT
  source 1..20: mol_type = other DNA
ggcggaccctgcactcagag

SEQ ID NO: 18535 - DNA, 20 bp, synthetic construct
  misc_feature 1..20: note = Description of Artificial Sequence: Synthetic oligonucleotide
  misc_feature 1..20: note = Target: ANGPTL4; (+) strand; PAM type: YTN; PAM sequence: TTG
  source 1..20: mol_type = other DNA
gcggaccctgcactcagagc

SEQ ID NO: 18536 - DNA, 20 bp, synthetic construct
  misc_feature 1..20: note = Description of Artificial Sequence: Synthetic oligonucleotide
  misc_feature 1..20: note = Target: ANGPTL4; (+) strand; PAM type: YTN; PAM sequence: CTG
  source 1..20: mol_type = other DNA
cactcagagcagccgtccgg

SEQ ID NO: 18537 - DNA, 20 bp, synthetic construct
  misc_feature 1..20: note = Description of Artificial Sequence: Synthetic oligonucleotide
  misc_feature 1..20: note = Target: ANGPTL4; (+) strand; PAM type: YTN; PAM sequence: CTC
  source 1..20: mol_type = other DNA
agagcagccgtccggccctg

SEQ ID NO: 18538 - DNA, 20 bp, synthetic construct
  misc_feature 1..20: note = Description of Artificial Sequence: Synthetic oligonucleotide
  misc_feature 1..20: note = Target: ANGPTL4; (+) strand; PAM type: YTN; PAM sequence: CTG
  source 1..20: mol_type = other DNA
ctggccccgggcaatgaggg

SEQ ID NO: 18539 - DNA, 20 bp, synthetic construct
  misc_feature 1..20: note = Description of Artificial Sequence: Synthetic oligonucleotide
  misc_feature 1..20: note = Target: ANGPTL4; (+) strand; PAM type: YTN; PAM sequence: CTG
  source 1..20: mol_type = other DNA
gccccgggcaatgaggggct

SEQ ID NO: 18540 - DNA, 20 bp, synthetic construct
  misc_feature 1..20: note = Description of Artificial Sequence: Synthetic oligonucleotide
  misc_feature 1..20: note = Target: ANGPTL4; (+) strand; PAM type: YTN; PAM sequence: CTT
  source 1..20: mol_type = other DNA
agcacccgggccggacagcg

SEQ ID NO: 18541 - DNA, 20 bp, synthetic construct
  misc_feature 1..20: note = Description of Artificial Sequence: Synthetic oligonucleotide
  misc_feature 1..20: note = Target: ANGPTL4; (+) strand; PAM type: YTN; PAM sequence: TTA
  source 1..20: mol_type = other DNA
gcacccgggccggacagcgg

SEQ ID NO: 18542 - DNA, 20 bp, synthetic construct
  misc_feature 1..20: note = Description of Artificial Sequence: Synthetic oligonucleotide
  misc_feature 1..20: note = Target: ANGPTL4; (+) strand; PAM type: YTN; PAM sequence: CTG
  source 1..20: mol_type = other DNA
cggagggtgtactgggtccc

SEQ ID NO: 18543 - DNA, 20 bp, synthetic construct
  misc_feature 1..20: note = Description of Artificial Sequence: Synthetic oligonucleotide
  misc_feature 1..20: note = Target: ANGPTL4; (+) strand; PAM type: YTN; PAM sequence: CTG
  source 1..20: mol_type = other DNA
ggtcccccagcagtgccagc

SEQ ID NO: 18544 - DNA, 20 bp, synthetic construct
  misc_feature 1..20: note = Description of Artificial Sequence: Synthetic oligonucleotide
  misc_feature 1..20: note = Target: ANGPTL4; (+) strand; PAM type: YTN; PAM sequence: CTG
  source 1..20: mol_type = other DNA
cgcttgatttctcaccaggc

SEQ ID NO: 18545 - DNA, 20 bp, synthetic construct
  misc_feature 1..20: note = Description of Artificial Sequence: Synthetic oligonucleotide
  misc_feature 1..20: note = Target: ANGPTL4; (+) strand; PAM type: YTN; PAM sequence: CTT
  source 1..20: mol_type = other DNA
gatttctcaccaggccttag

SEQ ID NO: 18546 - DNA, 20 bp, synthetic construct
  misc_feature 1..20: note = Description of Artificial Sequence: Synthetic oligonucleotide
  misc_feature 1..20: note = Target: ANGPTL4; (+) strand; PAM type: YTN; PAM sequence: TTG
  source 1..20: mol_type = other DNA
atttctcaccaggccttagc

SEQ ID NO: 18547 - DNA, 20 bp, synthetic construct
  misc_feature 1..20: note = Description of Artificial Sequence: Synthetic oligonucleotide
  misc_feature 1..20: note = Target: ANGPTL4; (+) strand; PAM type: YTN; PAM sequence: TTT
  source 1..20: mol_type = other DNA
ctcaccaggccttagctgcc

SEQ ID NO: 18548 - DNA, 20 bp, synthetic construct
  misc_feature 1..20: note = Description of Artificial Sequence: Synthetic oligonucleotide
  misc_feature 1..20: note = Target: ANGPTL4; (+) strand; PAM type: YTN; PAM sequence: TTC
  source 1..20: mol_type = other DNA
tcaccaggccttagctgcct

SEQ ID NO: 18549 - DNA, 20 bp, synthetic construct
  misc_feature 1..20: note = Description of Artificial Sequence: Synthetic oligonucleotide
  misc_feature 1..20: note = Target: ANGPTL4; (+) strand; PAM type: YTN; PAM sequence: CTC
  source 1..20: mol_type = other DNA
accaggccttagctgccttc

SEQ ID NO: 18550 - DNA, 20 bp, synthetic construct
  misc_feature 1..20: note = Description of Artificial Sequence: Synthetic oligonucleotide
  misc_feature 1..20: note = Target: ANGPTL4; (+) strand; PAM type: YTN; PAM sequence: CTT
  source 1..20: mol_type = other DNA
agctgccttcccgcggggca

SEQ ID NO: 18551 - DNA, 20 bp, synthetic construct
  misc_feature 1..20: note = Description of Artificial Sequence: Synthetic oligonucleotide
  misc_feature 1..20: note = Target: ANGPTL4; (+) strand; PAM type: YTN; PAM sequence: TTA
  source 1..20: mol_type = other DNA
gctgccttcccgcggggcag

SEQ ID NO: 18552 - DNA, 20 bp, synthetic construct
  misc_feature 1..20: note = Description of Artificial Sequence: Synthetic oligonucleotide
  misc_feature 1..20: note = Target: ANGPTL4; (+) strand; PAM type: YTN; PAM sequence: CTG
  source 1..20: mol_type = other DNA
ccttcccgcggggcagggat

SEQ ID NO: 18553 - DNA, 20 bp, synthetic construct
  misc_feature 1..20: note = Description of Artificial Sequence: Synthetic oligonucleotide
  misc_feature 1..20: note = Target: ANGPTL4; (+) strand; PAM type: YTN; PAM sequence: CTT
  source 1..20: mol_type = other DNA
cccgcggggcagggatcggg

SEQ ID NO: 18554 - DNA, 20 bp, synthetic construct
  misc_feature 1..20: note = Description of Artificial Sequence: Synthetic oligonucleotide
  misc_feature 1..20: note = Target: ANGPTL4; (+) strand; PAM type: YTN; PAM sequence: TTC
  source 1..20: mol_type = other DNA
ccgcggggcagggatcggga

SEQ ID NO: 18555 - DNA, 20 bp, synthetic construct
  misc_feature 1..20: note = Description of Artificial Sequence: Synthetic oligonucleotide
  misc_feature 1..20: note = Target: ANGPTL4; (+) strand; PAM type: YTN; PAM sequence: CTG
  source 1..20: mol_type = other DNA
cagcccgccatgcctgagcc

SEQ ID NO: 18556 - DNA, 20 bp, synthetic construct
  misc_feature 1..20: note = Description of Artificial Sequence: Synthetic oligonucleotide
  misc_feature 1..20: note = Target: ANGPTL4; (+) strand; PAM type: YTN; PAM sequence: CTG
  source 1..20: mol_type = other DNA
agcctcccaccccctccatg

SEQ ID NO: 18557 - DNA, 20 bp, synthetic construct
  misc_feature 1..20: note = Description of Artificial Sequence: Synthetic oligonucleotide
  misc_feature 1..20: note = Target: ANGPTL4; (+) strand; PAM type: YTN; PAM sequence: CTC
  source 1..20: mol_type = other DNA
ccaccccctccatgggctcc

SEQ ID NO: 18558 - DNA, 20 bp, synthetic construct
  misc_feature 1..20: note = Description of Artificial Sequence: Synthetic oligonucleotide
  misc_feature 1..20: note = Target: ANGPTL4; (+) strand; PAM type: YTN; PAM sequence: CTC
  source 1..20: mol_type = other DNA
catgggctcctgtgcggccc

SEQ ID NO: 18559 - DNA, 20 bp, synthetic construct
  misc_feature 1..20: note = Description of Artificial Sequence: Synthetic oligonucleotide
  misc_feature 1..20: note = Target: ANGPTL4; (+) strand; PAM type: YTN; PAM sequence: CTC
  source 1..20: mol_type = other DNA
ctgtgcggcccgcgcctccc

SEQ ID NO: 18560 - DNA, 20 bp, synthetic construct
  misc_feature 1..20: note = Description of Artificial Sequence: Synthetic oligonucleotide
  misc_feature 1..20: note = Target: ANGPTL4; (+) strand; PAM type: YTN; PAM sequence: CTG
  source 1..20: mol_type = other DNA
tgcggcccgcgcctccctga

SEQ ID NO: 18561 - DNA, 20 bp, synthetic construct
  misc_feature 1..20: note = Description of Artificial Sequence: Synthetic oligonucleotide
  misc_feature 1..20: note = Target: ANGPTL4; (+) strand; PAM type: YTN; PAM sequence: CTC
  source 1..20: mol_type = other DNA
cctgacgagcactgccccat

SEQ ID NO: 18562 - DNA, 20 bp, synthetic construct
  misc_feature 1..20: note = Description of Artificial Sequence: Synthetic oligonucleotide
  misc_feature 1..20: note = Target: ANGPTL4; (+) strand; PAM type: YTN; PAM sequence: CTG
  source 1..20: mol_type = other DNA
acgagcactgccccatgctc

SEQ ID NO: 18563 - DNA, 20 bp, synthetic construct
  misc_feature 1..20: note = Description of Artificial Sequence: Synthetic oligonucleotide
  misc_feature 1..20: note = Target: ANGPTL4; (+) strand; PAM type: YTN; PAM sequence: CTG
  source 1..20: mol_type = other DNA
ccccatgctccatggtgccc

SEQ ID NO: 18564 - DNA, 20 bp, synthetic construct
  misc_feature 1..20: note = Description of Artificial Sequence: Synthetic oligonucleotide
  misc_feature 1..20: note = Target: ANGPTL4; (+) strand; PAM type: YTN; PAM sequence: CTC
  source 1..20: mol_type = other DNA
catggtgcccagtcccatcc

SEQ ID NO: 18565 - DNA, 20 bp, synthetic construct
  misc_feature 1..20: note = Description of Artificial Sequence: Synthetic oligonucleotide
  misc_feature 1..20: note = Target: ANGPTL4; (+) strand; PAM type: YTN; PAM sequence: CTG
  source 1..20: mol_type = other DNA
aggagtgcaggcgcacggcg

SEQ ID NO: 18566 - DNA, 20 bp, synthetic construct
  misc_feature 1..20: note = Description of Artificial Sequence: Synthetic oligonucleotide
  misc_feature 1..20: note = Target: ANGPTL4; (+) strand; PAM type: YTN; PAM sequence: CTG
  source 1..20: mol_type = other DNA
gcaggcagctccacctgcag

SEQ ID NO: 18567 - DNA, 20 bp, synthetic construct
  misc_feature 1..20: note = Description of Artificial Sequence: Synthetic oligonucleotide
  misc_feature 1..20: note = Target: ANGPTL4; (+) strand; PAM type: YTN; PAM sequence: CTC
  source 1..20: mol_type = other DNA
cacctgcagccccggtgcag

SEQ ID NO: 18568 - DNA, 20 bp, synthetic construct
  misc_feature 1..20: note = Description of Artificial Sequence: Synthetic oligonucleotide
  misc_feature 1..20: note = Target: ANGPTL4; (+) strand; PAM type: YTN; PAM sequence: CTG
  source 1..20: mol_type = other DNA
cagccccggtgcaggatcca

SEQ ID NO: 18569 - DNA, 20 bp, synthetic construct
  misc_feature 1..20: note = Description of Artificial Sequence: Synthetic oligonucleotide
  misc_feature 1..20: note = Target: ANGPTL4; (+) strand; PAM type: YTN; PAM sequence: CTG
  source 1..20: mol_type = other DNA
ggtgaagctagctgggctcc

SEQ ID NO: 18570 - DNA, 20 bp, synthetic construct
  misc_feature 1..20: note = Description of Artificial Sequence: Synthetic oligonucleotide
  misc_feature 1..20: note = Target: ANGPTL4; (+) strand; PAM type: YTN; PAM sequence: CTA
  source 1..20: mol_type = other DNA
gctgggctcctgagtctggt

SEQ ID NO: 18571 - DNA, 20 bp, synthetic construct
  misc_feature 1..20: note = Description of Artificial Sequence: Synthetic oligonucleotide
  misc_feature 1..20: note = Target: ANGPTL4; (+) strand; PAM type: YTN; PAM sequence: CTG
  source 1..20: mol_type = other DNA
ggctcctgagtctggtgggg

SEQ ID NO: 18572 - DNA, 20 bp, synthetic construct
  misc_feature 1..20: note = Description of Artificial Sequence: Synthetic oligonucleotide
  misc_feature 1..20: note = Target: ANGPTL4; (+) strand; PAM type: YTN; PAM sequence: CTC
  source 1..20: mol_type = other DNA
ctgagtctggtggggacgtg

SEQ ID NO: 18573 - DNA, 20 bp, synthetic construct
  misc_feature 1..20: note = Description of Artificial Sequence: Synthetic oligonucleotide
  misc_feature 1..20: note = Target: ANGPTL4; (+) strand; PAM type: YTN; PAM sequence: CTG
  source 1..20: mol_type = other DNA
agtctggtggggacgtggag

SEQ ID NO: 18574 - DNA, 20 bp, synthetic construct
  misc_feature 1..20: note = Description of Artificial Sequence: Synthetic oligonucleotide
  misc_feature 1..20: note = Target: ANGPTL4; (+) strand; PAM type: YTN; PAM sequence: CTG
  source 1..20: mol_type = other DNA
gtggggacgtggagaacctt

SEQ ID NO: 18575 - DNA, 20 bp, synthetic construct
  misc_feature 1..20: note = Description of Artificial Sequence: Synthetic oligonucleotide
  misc_feature 1..20: note = Target: ANGPTL4; (+) strand; PAM type: YTN; PAM sequence: CTT
  source 1..20: mol_type = other DNA
tgtctagctcagggattgta

SEQ ID NO: 18576 - DNA, 20 bp, synthetic construct
  misc_feature 1..20: note = Description of Artificial Sequence: Synthetic oligonucleotide
  misc_feature 1..20: note = Target: ANGPTL4; (+) strand; PAM type: YTN; PAM sequence: TTT
  source 1..20: mol_type = other DNA
gtctagctcagggattgtaa

SEQ ID NO: 18577 - DNA, 20 bp, synthetic construct
  misc_feature 1..20: note = Description of Artificial Sequence: Synthetic oligonucleotide
  misc_feature 1..20: note = Target: ANGPTL4; (+) strand; PAM type: YTN; PAM sequence: TTG
  source 1..20: mol_type = other DNA
tctagctcagggattgtaaa

SEQ ID NO: 18578 - DNA, 20 bp, synthetic construct
  misc_feature 1..20: note = Description of Artificial Sequence: Synthetic oligonucleotide
  misc_feature 1..20: note = Target: ANGPTL4; (+) strand; PAM type: YTN; PAM sequence: CTA
  source 1..20: mol_type = other DNA
gctcagggattgtaaataca

SEQ ID NO: 18579 - DNA, 20 bp, synthetic construct
  misc_feature 1..20: note = Description of Artificial Sequence: Synthetic oligonucleotide
  misc_feature 1..20: note = Target: ANGPTL4; (+) strand; PAM type: YTN; PAM sequence: CTC
  source 1..20: mol_type = other DNA
agggattgtaaatacaccaa

SEQ ID NO: 18580 - DNA, 20 bp, synthetic construct
  misc_feature 1..20: note = Description of Artificial Sequence: Synthetic oligonucleotide
  misc_feature 1..20: note = Target: ANGPTL4; (+) strand; PAM type: YTN; PAM sequence: TTG
  source 1..20: mol_type = other DNA
taaatacaccaatcatcacc

SEQ ID NO: 18581 - DNA, 20 bp, synthetic construct
  misc_feature 1..20: note = Description of Artificial Sequence: Synthetic oligonucleotide
  misc_feature 1..20: note = Target: ANGPTL4; (+) strand; PAM type: YTN; PAM sequence: CTA
  source 1..20: mol_type = other DNA
tgtctagctcagggtttgtg

SEQ ID NO: 18582 - DNA, 20 bp, synthetic construct
  misc_feature 1..20: note = Description of Artificial Sequence: Synthetic oligonucleotide
  misc_feature 1..20: note = Target: ANGPTL4; (+) strand; PAM type: YTN; PAM sequence: CTA
  source 1..20: mol_type = other DNA
gctcagggtttgtgaatgca

SEQ ID NO: 18583 - DNA, 20 bp, synthetic construct
  misc_feature 1..20: note = Description of Artificial Sequence: Synthetic oligonucleotide
  misc_feature 1..20: note = Target: ANGPTL4; (+) strand; PAM type: YTN; PAM sequence: CTC
  source 1..20: mol_type = other DNA
agggtttgtgaatgcaccaa

SEQ ID NO: 18584 - DNA, 20 bp, synthetic construct
  misc_feature 1..20: note = Description of Artificial Sequence: Synthetic oligonucleotide
  misc_feature 1..20: note = Target: ANGPTL4; (+) strand; PAM type: YTN; PAM sequence: TTT
  source 1..20: mol_type = other DNA
gtgaatgcaccaatgaacac

SEQ ID NO: 18585 - DNA, 20 bp, synthetic construct
  misc_feature 1..20: note = Description of Artificial Sequence: Synthetic oligonucleotide
  misc_feature 1..20: note = Target: ANGPTL4; (+) strand; PAM type: YTN; PAM sequence: TTG
  source 1..20: mol_type = other DNA
tgaatgcaccaatgaacact

SEQ ID NO: 18586 - DNA, 20 bp, synthetic construct
  misc_feature 1..20: note = Description of Artificial Sequence: Synthetic oligonucleotide
  misc_feature 1..20: note = Target: ANGPTL4; (+) strand; PAM type: YTN; PAM sequence: CTC
  source 1..20: mol_type = other DNA
tgtatctagctactctggtg

SEQ ID NO: 18587 - DNA, 20 bp, synthetic construct
  misc_feature 1..20: note = Description of Artificial Sequence: Synthetic oligonucleotide
  misc_feature 1..20: note = Target: ANGPTL4; (+) strand; PAM type: YTN; PAM sequence: CTG
  source 1..20: mol_type = other DNA
tatctagctactctggtggg

SEQ ID NO: 18588 - DNA, 20 bp, synthetic construct
  misc_feature 1..20: note = Description of Artificial Sequence: Synthetic oligonucleotide
  misc_feature 1..20: note = Target: ANGPTL4; (+) strand; PAM type: YTN; PAM sequence: CTA
  source 1..20: mol_type = other DNA
gctactctggtggggccttg

SEQ ID NO: 18589 - DNA, 20 bp, synthetic construct
  misc_feature 1..20: note = Description of Artificial Sequence: Synthetic oligonucleotide
  misc_feature 1..20: note = Target: ANGPTL4; (+) strand; PAM type: YTN; PAM sequence: CTA
  source 1..20: mol_type = other DNA
ctctggtggggccttggaga

SEQ ID NO: 18590 - DNA, 20 bp, synthetic construct
  misc_feature 1..20: note = Description of Artificial Sequence: Synthetic oligonucleotide
  misc_feature 1..20: note = Target: ANGPTL4; (+) strand; PAM type: YTN; PAM sequence: CTC
  source 1..20: mol_type = other DNA
tggtggggccttggagaacc

SEQ ID NO: 18591 - DNA, 20 bp, synthetic construct
  misc_feature 1..20: note = Description of Artificial Sequence: Synthetic oligonucleotide
  misc_feature 1..20: note = Target: ANGPTL4; (+) strand; PAM type: YTN; PAM sequence: CTG
  source 1..20: mol_type = other DNA
gtggggccttggagaacctt

SEQ ID NO: 18592 - DNA, 20 bp, synthetic construct
  misc_feature 1..20: note = Description of Artificial Sequence: Synthetic oligonucleotide
  misc_feature 1..20: note = Target: ANGPTL4; (+) strand; PAM type: YTN; PAM sequence: CTT
  source 1..20: mol_type = other DNA
ggagaacctttatgtctagc

SEQ ID NO: 18593 - DNA, 20 bp, synthetic construct
  misc_feature 1..20: note = Description of Artificial Sequence: Synthetic oligonucleotide
  misc_feature 1..20: note = Target: ANGPTL4; (+) strand; PAM type: YTN; PAM sequence: TTG
  source 1..20: mol_type = other DNA
gagaacctttatgtctagct

SEQ ID NO: 18594 - DNA, 20 bp, synthetic construct
  misc_feature 1..20: note = Description of Artificial Sequence: Synthetic oligonucleotide
  misc_feature 1..20: note = Target: ANGPTL4; (+) strand; PAM type: YTN; PAM sequence: CTT
  source 1..20: mol_type = other DNA
tatgtctagctcagggattg

SEQ ID NO: 18595 - DNA, 20 bp, synthetic construct
  misc_feature 1..20: note = Description of Artificial Sequence: Synthetic oligonucleotide
  misc_feature 1..20: note = Target: ANGPTL4; (+) strand; PAM type: YTN; PAM sequence: TTT
  source 1..20: mol_type = other DNA
atgtctagctcagggattgt

SEQ ID NO: 18596 - DNA, 20 bp, synthetic construct
  misc_feature 1..20: note = Description of Artificial Sequence: Synthetic oligonucleotide
  misc_feature 1..20: note = Target: ANGPTL4; (+) strand; PAM type: YTN; PAM sequence: TTA
  source 1..20: mol_type = other DNA
tgtctagctcagggattgta

SEQ ID NO: 18597 - DNA, 20 bp, synthetic construct
  misc_feature 1..20: note = Description of Artificial Sequence: Synthetic oligonucleotide
  misc_feature 1..20: note = Target: ANGPTL4; (+) strand; PAM type: YTN; PAM sequence: CTA
  source 1..20: mol_type = other DNA
gctcagggattgtaaataca

SEQ ID NO: 18598 - DNA, 20 bp, synthetic construct
  misc_feature 1..20: note = Description of Artificial Sequence: Synthetic oligonucleotide
  misc_feature 1..20: note = Target: ANGPTL4; (+) strand; PAM type: YTN; PAM sequence: CTC
  source 1..20: mol_type = other DNA
agggattgtaaatacaccaa

SEQ ID NO: 18599 - DNA, 20 bp, synthetic construct
  misc_feature 1..20: note = Description of Artificial Sequence: Synthetic oligonucleotide
  misc_feature 1..20: note = Target: ANGPTL4; (+) strand; PAM type: YTN; PAM sequence: TTG
  source 1..20: mol_type = other DNA
taaatacaccaatcggcact

SEQ ID NO: 18600 - DNA, 20 bp, synthetic construct
  misc_feature 1..20: note = Description of Artificial Sequence: Synthetic oligonucleotide
  misc_feature 1..20: note = Target: ANGPTL4; (+) strand; PAM type: YTN; PAM sequence: CTC
  source 1..20: mol_type = other DNA
tgtatctagctcaaggtttg

SEQ ID NO: 18601 - DNA, 20 bp, synthetic construct
  misc_feature 1..20: note = Description of Artificial Sequence: Synthetic oligonucleotide
  misc_feature 1..20: note = Target: ANGPTL4; (+) strand; PAM type: YTN; PAM sequence: CTG
  source 1..20: mol_type = other DNA
tatctagctcaaggtttgta

SEQ ID NO: 18602 - DNA, 20 bp, synthetic construct
  misc_feature 1..20: note = Description of Artificial Sequence: Synthetic oligonucleotide
  misc_feature 1..20: note = Target: ANGPTL4; (+) strand; PAM type: YTN; PAM sequence: CTA
  source 1..20: mol_type = other DNA
gctcaaggtttgtaaacaca

SEQ ID NO: 18603 - DNA, 20 bp, synthetic construct
  misc_feature 1..20: note = Description of Artificial Sequence: Synthetic oligonucleotide
  misc_feature 1..20: note = Target: ANGPTL4; (+) strand; PAM type: YTN; PAM sequence: CTC
  source 1..20: mol_type = other DNA
aaggtttgtaaacacaccaa

SEQ ID NO: 18604 - DNA, 20 bp, synthetic construct
  misc_feature 1..20: note = Description of Artificial Sequence: Synthetic oligonucleotide
  misc_feature 1..20: note = Target: ANGPTL4; (+) strand; PAM type: YTN; PAM sequence: TTT
  source 1..20: mol_type = other DNA
gtaaacacaccaatcagcac

SEQ ID NO: 18605 - DNA, 20 bp, synthetic construct
  misc_feature 1..20: note = Description of Artificial Sequence: Synthetic oligonucleotide
  misc_feature 1..20: note = Target: ANGPTL4; (+) strand; PAM type: YTN; PAM sequence: TTG
  source 1..20: mol_type = other DNA
taaacacaccaatcagcacc

SEQ ID NO: 18606 - DNA, 20 bp, synthetic construct
  misc_feature 1..20: note = Description of Artificial Sequence: Synthetic oligonucleotide
  misc_feature 1..20: note = Target: ANGPTL4; (+) strand; PAM type: YTN; PAM sequence: CTG
  source 1..20: mol_type = other DNA
tgtctagctcagggtttgtg

SEQ ID NO: 18607 - DNA, 20 bp, synthetic construct
  misc_feature 1..20: note = Description of Artificial Sequence: Synthetic oligonucleotide
  misc_feature 1..20: note = Target: ANGPTL4; (+) strand; PAM type: YTN; PAM sequence: CTA
  source 1..20: mol_type = other DNA
gctcagggtttgtgaatgca

SEQ ID NO: 18608 - DNA, 20 bp, synthetic construct
  misc_feature 1..20: note = Description of Artificial Sequence: Synthetic oligonucleotide
  misc_feature 1..20: note = Target: ANGPTL4; (+) strand; PAM type: YTN; PAM sequence: CTC
  source 1..20: mol_type = other DNA
agggtttgtgaatgcaccaa

SEQ ID NO: 18609 - DNA, 20 bp, synthetic construct
  misc_feature 1..20: note = Description of Artificial Sequence: Synthetic oligonucleotide
  misc_feature 1..20: note = Target: ANGPTL4; (+) strand; PAM type: YTN; PAM sequence: TTT
  source 1..20: mol_type = other DNA
gtgaatgcaccaatcgacac

SEQ ID NO: 18610 - DNA, 20 bp, synthetic construct
  misc_feature 1..20: note = Description of Artificial Sequence: Synthetic oligonucleotide
  misc_feature 1..20: note = Target: ANGPTL4; (+) strand; PAM type: YTN; PAM sequence: TTG
  source 1..20: mol_type = other DNA
tgaatgcaccaatcgacact

SEQ ID NO: 18611 - DNA, 20 bp, synthetic construct
  misc_feature 1..20: note = Description of Artificial Sequence: Synthetic oligonucleotide
  misc_feature 1..20: note = Target: ANGPTL4; (+) strand; PAM type: YTN; PAM sequence: CTC
  source 1..20: mol_type = other DNA
tgtatctagctactgtggtg

SEQ ID NO: 18612 - DNA, 20 bp, synthetic construct
  misc_feature 1..20: note = Description of Artificial Sequence: Synthetic oligonucleotide
  misc_feature 1..20: note = Target: ANGPTL4; (+) strand; PAM type: YTN; PAM sequence: CTG
  source 1..20: mol_type = other DNA
tatctagctactgtggtggg

SEQ ID NO: 18613 - DNA, 20 bp, synthetic construct
  misc_feature 1..20: note = Description of Artificial Sequence: Synthetic oligonucleotide
  misc_feature 1..20: note = Target: ANGPTL4; (+) strand; PAM type: YTN; PAM sequence: CTA
  source 1..20: mol_type = other DNA
gctactgtggtggggccttg

SEQ ID NO: 18614 - DNA, 20 bp, synthetic construct
  misc_feature 1..20: note = Description of Artificial Sequence: Synthetic oligonucleotide
  misc_feature 1..20: note = Target: ANGPTL4; (+) strand; PAM type: YTN; PAM sequence: CTA
  source 1..20: mol_type = other DNA
ctgtggtggggccttggaga

SEQ ID NO: 18615 - DNA, 20 bp, synthetic construct
  misc_feature 1..20: note = Description of Artificial Sequence: Synthetic oligonucleotide
  misc_feature 1..20: note = Target: ANGPTL4; (+) strand; PAM type: YTN; PAM sequence: CTG
  source 1..20: mol_type = other DNA
tggtggggccttggagaacc

SEQ ID NO: 18616 - DNA, 20 bp, synthetic construct
  misc_feature 1..20: note = Description of Artificial Sequence: Synthetic oligonucleotide
  misc_feature 1..20: note = Target: ANGPTL4; (+) strand; PAM type: YTN; PAM sequence: CTT
  source 1..20: mol_type = other DNA
ggagaacctttgtgttgaca

SEQ ID NO: 18617 - DNA, 20 bp, synthetic construct
  misc_feature 1..20: note = Description of Artificial Sequence: Synthetic oligonucleotide
  misc_feature 1..20: note = Target: ANGPTL4; (+) strand; PAM type: YTN; PAM sequence: TTG
  source 1..20: mol_type = other DNA
gagaacctttgtgttgacac

SEQ ID NO: 18618 - DNA, 20 bp, synthetic construct
  misc_feature 1..20: note = Description of Artificial Sequence: Synthetic oligonucleotide
  misc_feature 1..20: note = Target: ANGPTL4; (+) strand; PAM type: YTN; PAM sequence: CTT
  source 1..20: mol_type = other DNA
tgtgttgacactctgtatct

SEQ ID NO: 18619 - DNA, 20 bp, synthetic construct
  misc_feature 1..20: note = Description of Artificial Sequence: Synthetic oligonucleotide
  misc_feature 1..20: note = Target: ANGPTL4; (+) strand; PAM type: YTN; PAM sequence: TTT
  source 1..20: mol_type = other DNA
gtgttgacactctgtatcta

SEQ ID NO: 18620 - DNA, 20 bp, synthetic construct
  misc_feature 1..20: note = Description of Artificial Sequence: Synthetic oligonucleotide
  misc_feature 1..20: note = Target: ANGPTL4; (+) strand; PAM type: YTN; PAM sequence: TTG
  source 1..20: mol_type = other DNA
tgttgacactctgtatctag

SEQ ID NO: 18621 - DNA, 20 bp, synthetic construct
  misc_feature 1..20: note = Description of Artificial Sequence: Synthetic oligonucleotide
  misc_feature 1..20: note = Target: ANGPTL4; (+) strand; PAM type: YTN; PAM sequence: TTG
  source 1..20: mol_type = other DNA
acactctgtatctagttaat

SEQ ID NO: 18622 - DNA, 20 bp, synthetic construct
  misc_feature 1..20: note = Description of Artificial Sequence: Synthetic oligonucleotide
  misc_feature 1..20: note = Target: ANGPTL4; (+) strand; PAM type: YTN; PAM sequence: CTC
  source 1..20: mol_type = other DNA
tgtatctagttaatctggtg

SEQ ID NO: 18623 - DNA, 20 bp, synthetic construct
  misc_feature 1..20: note = Description of Artificial Sequence: Synthetic oligonucleotide
  misc_feature 1..20: note = Target: ANGPTL4; (+) strand; PAM type: YTN; PAM sequence: CTG
  source 1..20: mol_type = other DNA
tatctagttaatctggtggg

SEQ ID NO: 18624 - DNA, 20 bp, synthetic construct
  misc_feature 1..20: note = Description of Artificial Sequence: Synthetic oligonucleotide
  misc_feature 1..20: note = Target: ANGPTL4; (+) strand; PAM type: YTN; PAM sequence: CTA
  source 1..20: mol_type = other DNA
gttaatctggtggggatgtg

SEQ ID NO: 18625 - DNA, 20 bp, synthetic construct
  misc_feature 1..20: note = Description of Artificial Sequence: Synthetic oligonucleotide
  misc_feature 1..20: note = Target: ANGPTL4; (+) strand; PAM type: YTN; PAM sequence: TTA
  source 1..20: mol_type = other DNA
atctggtggggatgtggaga

SEQ ID NO: 18626 - DNA, 20 bp, synthetic construct
  misc_feature 1..20: note = Description of Artificial Sequence: Synthetic oligonucleotide
  misc_feature 1..20: note = Target: ANGPTL4; (+) strand; PAM type: YTN; PAM sequence: CTG
  source 1..20: mol_type = other DNA
gtggggatgtggagaacctt

SEQ ID NO: 18627 - DNA, 20 bp, synthetic construct
  misc_feature 1..20: note = Description of Artificial Sequence: Synthetic oligonucleotide
  misc_feature 1..20: note = Target: ANGPTL4; (+) strand; PAM type: YTN; PAM sequence: CTT
  source 1..20: mol_type = other DNA
tgtgtctagctcaggaattg

SEQ ID NO: 18628 - DNA, 20 bp, synthetic construct
  misc_feature 1..20: note = Description of Artificial Sequence: Synthetic oligonucleotide
  misc_feature 1..20: note = Target: ANGPTL4; (+) strand; PAM type: YTN; PAM sequence: TTT
  source 1..20: mol_type = other DNA
gtgtctagctcaggaattgt

SEQ ID NO: 18629 - DNA, 20 bp, synthetic construct
  misc_feature 1..20: note = Description of Artificial Sequence: Synthetic oligonucleotide
  misc_feature 1..20: note = Target: ANGPTL4; (+) strand; PAM type: YTN; PAM sequence: TTG
  source 1..20: mol_type = other DNA
tgtctagctcaggaattgta

SEQ ID NO: 18630 - DNA, 20 bp, synthetic construct
  misc_feature 1..20: note = Description of Artificial Sequence: Synthetic oligonucleotide
  misc_feature 1..20: note = Target: ANGPTL4; (+) strand; PAM type: YTN; PAM sequence: CTA
  source 1..20: mol_type = other DNA
gctcaggaattgtaaacgca

SEQ ID NO: 18631 - DNA, 20 bp, synthetic construct
  misc_feature 1..20: note = Description of Artificial Sequence: Synthetic oligonucleotide
  misc_feature 1..20: note = Target: ANGPTL4; (+) strand; PAM type: YTN; PAM sequence: CTC
  source 1..20: mol_type = other DNA
aggaattgtaaacgcaccaa

SEQ ID NO: 18632 - DNA, 20 bp, synthetic construct
  misc_feature 1..20: note = Description of Artificial Sequence: Synthetic oligonucleotide
  misc_feature 1..20: note = Target: ANGPTL4; (+) strand; PAM type: YTN; PAM sequence: TTG
  source 1..20: mol_type = other DNA
taaacgcaccaatcagcgcc

SEQ ID NO: 18633 - DNA, 20 bp, synthetic construct
  misc_feature 1..20: note = Description of Artificial Sequence: Synthetic oligonucleotide
  misc_feature 1..20: note = Target: ANGPTL4; (+) strand; PAM type: YTN; PAM sequence: CTG
  source 1..20: mol_type = other DNA
tcaaaacagaccagtgggct

SEQ ID NO: 18634 - DNA, 20 bp, synthetic construct
  misc_feature 1..20: note = Description of Artificial Sequence: Synthetic oligonucleotide
  misc_feature 1..20: note = Target: ANGPTL4; (+) strand; PAM type: YTN; PAM sequence: CTC
  source 1..20: mol_type = other DNA
taccaatcagcaggatgtgg

SEQ ID NO: 18635 - DNA, 20 bp, synthetic construct
  misc_feature 1..20: note = Description of Artificial Sequence: Synthetic oligonucleotide
  misc_feature 1..20: note = Target: ANGPTL4; (+) strand; PAM type: YTN; PAM sequence: CTA
  source 1..20: mol_type = other DNA
ccaatcagcaggatgtgggt

SEQ ID NO: 18636 - DNA, 20 bp, synthetic construct
  misc_feature 1..20: note = Description of Artificial Sequence: Synthetic oligonucleotide
  misc_feature 1..20: note = Target: ANGPTL4; (+) strand; PAM type: YTN; PAM sequence: CTG
  source 1..20: mol_type = other DNA
cccgagccagcagtggcaac

SEQ ID NO: 18637 - DNA, 20 bp, synthetic construct
  misc_feature 1..20: note = Description of Artificial Sequence: Synthetic oligonucleotide
  misc_feature 1..20: note = Target: ANGPTL4; (+) strand; PAM type: YTN; PAM sequence: CTT
  source 1..20: mol_type = other DNA
gggtccccttccacactgtg

SEQ ID NO: 18638 - DNA, 20 bp, synthetic construct
  misc_feature 1..20: note = Description of Artificial Sequence: Synthetic oligonucleotide
  misc_feature 1..20: note = Target: ANGPTL4; (+) strand; PAM type: YTN; PAM sequence: TTG
  source 1..20: mol_type = other DNA
ggtccccttccacactgtgg

SEQ ID NO: 18639 - DNA, 20 bp, synthetic construct
  misc_feature 1..20: note = Description of Artificial Sequence: Synthetic oligonucleotide
  misc_feature 1..20: note = Target: ANGPTL4; (+) strand; PAM type: YTN; PAM sequence: CTT
  source 1..20: mol_type = other DNA
ccacactgtggaagctttgt

SEQ ID NO: 18640 - DNA, 20 bp, synthetic construct
  misc_feature 1..20: note = Description of Artificial Sequence: Synthetic oligonucleotide
  misc_feature 1..20: note = Target: ANGPTL4; (+) strand; PAM type: YTN; PAM sequence: TTC
  source 1..20: mol_type = other DNA
cacactgtggaagctttgtt

SEQ ID NO: 18641 - DNA, 20 bp, synthetic construct
  misc_feature 1..20: note = Description of Artificial Sequence: Synthetic oligonucleotide
  misc_feature 1..20: note = Target: ANGPTL4; (+) strand; PAM type: YTN; PAM sequence: CTG
  source 1..20: mol_type = other DNA
tggaagctttgttcttttgc

SEQ ID NO: 18642 - DNA, 20 bp, synthetic construct
  misc_feature 1..20: note = Description of Artificial Sequence: Synthetic oligonucleotide
  misc_feature 1..20: note = Target: ANGPTL4; (+) strand; PAM type: YTN; PAM sequence: CTT
  source 1..20: mol_type = other DNA
tgttcttttgctctttgcaa

SEQ ID NO: 18643 - DNA, 20 bp, synthetic construct
  misc_feature 1..20: note = Description of Artificial Sequence: Synthetic oligonucleotide
  misc_feature 1..20: note = Target: ANGPTL4; (+) strand; PAM type: YTN; PAM sequence: TTT
  source 1..20: mol_type = other DNA
gttcttttgctctttgcaat

SEQ ID NO: 18644 - DNA, 20 bp, synthetic construct
  misc_feature 1..20: note = Description of Artificial Sequence: Synthetic oligonucleotide
  misc_feature 1..20: note = Target: ANGPTL4; (+) strand; PAM type: YTN; PAM sequence: TTG
  source 1..20: mol_type = other DNA
ttcttttgctctttgcaata

SEQ ID NO: 18645 - DNA, 20 bp, synthetic construct
  misc_feature 1..20: note = Description of Artificial Sequence: Synthetic oligonucleotide
  misc_feature 1..20: note = Target: ANGPTL4; (+) strand; PAM type: YTN; PAM sequence: TTC
  source 1..20: mol_type = other DNA
ttttgctctttgcaataaat

SEQ ID NO: 18646 - DNA, 20 bp, synthetic construct
  misc_feature 1..20: note = Description of Artificial Sequence: Synthetic oligonucleotide
  misc_feature 1..20: note = Target: ANGPTL4; (+) strand; PAM type: YTN; PAM sequence: CTT
  source 1..20: mol_type = other DNA
ttgctctttgcaataaatct

SEQ ID NO: 18647 - DNA, 20 bp, synthetic construct
  misc_feature 1..20: note = Description of Artificial Sequence: Synthetic oligonucleotide
  misc_feature 1..20: note = Target: ANGPTL4; (+) strand; PAM type: YTN; PAM sequence: TTT
  source 1..20: mol_type = other DNA
tgctctttgcaataaatctt

SEQ ID NO: 18648 - DNA, 20 bp, synthetic construct
  misc_feature 1..20: note = Description of Artificial Sequence: Synthetic oligonucleotide
  misc_feature 1..20: note = Target: ANGPTL4; (+) strand; PAM type: YTN; PAM sequence: TTT
  source 1..20: mol_type = other DNA
gctctttgcaataaatcttg

SEQ ID NO: 18649 - DNA, 20 bp, synthetic construct
  misc_feature 1..20: note = Description of Artificial Sequence: Synthetic oligonucleotide
  misc_feature 1..20: note = Target: ANGPTL4; (+) strand; PAM type: YTN; PAM sequence: TTG
  source 1..20: mol_type = other DNA
ctctttgcaataaatcttgt

SEQ ID NO: 18650 - DNA, 20 bp, synthetic construct
  misc_feature 1..20: note = Description of Artificial Sequence: Synthetic oligonucleotide
  misc_feature 1..20: note = Target: ANGPTL4; (+) strand; PAM type: YTN; PAM sequence: CTC
  source 1..20: mol_type = other DNA
tttgcaataaatcttgtact

SEQ ID NO: 18651 - DNA, 20 bp, synthetic construct
  misc_feature 1..20: note = Description of Artificial Sequence: Synthetic oligonucleotide
  misc_feature 1..20: note = Target: ANGPTL4; (+) strand; PAM type: YTN; PAM sequence: CTT
  source 1..20: mol_type = other DNA
tgcaataaatcttgtactgc

SEQ ID NO: 18652 - DNA, 20 bp, synthetic construct
  misc_feature 1..20: note = Description of Artificial Sequence: Synthetic oligonucleotide
  misc_feature 1..20: note = Target: ANGPTL4; (+) strand; PAM type: YTN; PAM sequence: TTT
  source 1..20: mol_type = other DNA
gcaataaatcttgtactgct

SEQ ID NO: 18653 - DNA, 20 bp, synthetic construct
  misc_feature 1..20: note = Description of Artificial Sequence: Synthetic oligonucleotide
  misc_feature 1..20: note = Target: ANGPTL4; (+) strand; PAM type: YTN; PAM sequence: TTG
  source 1..20: mol_type = other DNA
caataaatcttgtactgctc

SEQ ID NO: 18654 - DNA, 20 bp, synthetic construct
  misc_feature 1..20: note = Description of Artificial Sequence: Synthetic oligonucleotide
  misc_feature 1..20: note = Target: ANGPTL4; (+) strand; PAM type: YTN; PAM sequence: CTT
  source 1..20: mol_type = other DNA
gtactgctcactctttgggt

SEQ ID NO: 18655 - DNA, 20 bp, synthetic construct
  misc_feature 1..20: note = Description of Artificial Sequence: Synthetic oligonucleotide
  misc_feature 1..20: note = Target: ANGPTL4; (+) strand; PAM type: YTN; PAM sequence: TTG
  source 1..20: mol_type = other DNA
tactgctcactctttgggtc

SEQ ID NO: 18656 - DNA, 20 bp, synthetic construct
  misc_feature 1..20: note = Description of Artificial Sequence: Synthetic oligonucleotide
  misc_feature 1..20: note = Target: ANGPTL4; (+) strand; PAM type: YTN; PAM sequence: CTG
  source 1..20: mol_type = other DNA
ctcactctttgggtccccac

SEQ ID NO: 18657 - DNA, 20 bp, synthetic construct
  misc_feature 1..20: note = Description of Artificial Sequence: Synthetic oligonucleotide
  misc_feature 1..20: note = Target: ANGPTL4; (+) strand; PAM type: YTN; PAM sequence: CTC
  source 1..20: mol_type = other DNA
actctttgggtccccactgc

SEQ ID NO: 18658 - DNA, 20 bp, synthetic construct
  misc_feature 1..20: note = Description of Artificial Sequence: Synthetic oligonucleotide
  misc_feature 1..20: note = Target: ANGPTL4; (+) strand; PAM type: YTN; PAM sequence: CTC
  source 1..20: mol_type = other DNA
tttgggtccccactgctttt

SEQ ID NO: 18659 - DNA, 20 bp, synthetic construct
  misc_feature 1..20: note = Description of Artificial Sequence: Synthetic oligonucleotide
  misc_feature 1..20: note = Target: ANGPTL4; (+) strand; PAM type: YTN; PAM sequence: CTT
  source 1..20: mol_type = other DNA
tgggtccccactgcttttat

SEQ ID NO: 18660 - DNA, 20 bp, synthetic construct
  misc_feature 1..20: note = Description of Artificial Sequence: Synthetic oligonucleotide
  misc_feature 1..20: note = Target: ANGPTL4; (+) strand; PAM type: YTN; PAM sequence: TTT
  source 1..20: mol_type = other DNA
gggtccccactgcttttatg

SEQ ID NO: 18661 - DNA, 20 bp, synthetic construct
  misc_feature 1..20: note = Description of Artificial Sequence: Synthetic oligonucleotide
  misc_feature 1..20: note = Target: ANGPTL4; (+) strand; PAM type: YTN; PAM sequence: TTG
  source 1..20: mol_type = other DNA
ggtccccactgcttttatga

SEQ ID NO: 18662 - DNA, 20 bp, synthetic construct
  misc_feature 1..20: note = Description of Artificial Sequence: Synthetic oligonucleotide
  misc_feature 1..20: note = Target: ANGPTL4; (+) strand; PAM type: YTN; PAM sequence: CTG
  source 1..20: mol_type = other DNA
cttttatgagctgtaacact

SEQ ID NO: 18663 - DNA, 20 bp, synthetic construct
  misc_feature 1..20: note = Description of Artificial Sequence: Synthetic oligonucleotide
  misc_feature 1..20: note = Target: ANGPTL4; (+) strand; PAM type: YTN; PAM sequence: CTT
  source 1..20: mol_type = other DNA
ttatgagctgtaacactcac

SEQ ID NO: 18664 - DNA, 20 bp, synthetic construct
  misc_feature 1..20: note = Description of Artificial Sequence: Synthetic oligonucleotide
  misc_feature 1..20: note = Target: ANGPTL4; (+) strand; PAM type: YTN; PAM sequence: TTT
  source 1..20: mol_type = other DNA
tatgagctgtaacactcact

SEQ ID NO: 18665 - DNA, 20 bp, synthetic construct
  misc_feature 1..20: note = Description of Artificial Sequence: Synthetic oligonucleotide
  misc_feature 1..20: note = Target: ANGPTL4; (+) strand; PAM type: YTN; PAM sequence: TTT
  source 1..20: mol_type = other DNA
atgagctgtaacactcactg

SEQ ID NO: 18666 - DNA, 20 bp, synthetic construct
  misc_feature 1..20: note = Description of Artificial Sequence: Synthetic oligonucleotide
  misc_feature 1..20: note = Target: ANGPTL4; (+) strand; PAM type: YTN; PAM sequence: TTA
  source 1..20: mol_type = other DNA
tgagctgtaacactcactgc

SEQ ID NO: 18667 - DNA, 20 bp, synthetic construct
  misc_feature 1..20: note = Description of Artificial Sequence: Synthetic oligonucleotide
  misc_feature 1..20: note = Target: ANGPTL4; (+) strand; PAM type: YTN; PAM sequence: CTG
  source 1..20: mol_type = other DNA
taacactcactgcgaaggtc

SEQ ID NO: 18668 - DNA, 20 bp, synthetic construct
  misc_feature 1..20: note = Description of Artificial Sequence: Synthetic oligonucleotide
  misc_feature 1..20: note = Target: ANGPTL4; (+) strand; PAM type: YTN; PAM sequence: CTC
  source 1..20: mol_type = other DNA
actgcgaaggtctgcagctt

SEQ ID NO: 18669 - DNA, 20 bp, synthetic construct
  misc_feature 1..20: note = Description of Artificial Sequence: Synthetic oligonucleotide
  misc_feature 1..20: note = Target: ANGPTL4; (+) strand; PAM type: YTN; PAM sequence: CTG
  source 1..20: mol_type = other DNA
cgaaggtctgcagcttcact

SEQ ID NO: 18670 - DNA, 20 bp, synthetic construct
  misc_feature 1..20: note = Description of Artificial Sequence: Synthetic oligonucleotide
  misc_feature 1..20: note = Target: ANGPTL4; (+) strand; PAM type: YTN; PAM sequence: CTG
  source 1..20: mol_type = other DNA
cagcttcactcctgagccag

SEQ ID NO: 18671 - DNA, 20 bp, synthetic construct
  misc_feature 1..20: note = Description of Artificial Sequence: Synthetic oligonucleotide
  misc_feature 1..20: note = Target: ANGPTL4; (+) strand; PAM type: YTN; PAM sequence: CTT
  source 1..20: mol_type = other DNA
cactcctgagccagtgaaac

SEQ ID NO: 18672 - DNA, 20 bp, synthetic construct
  misc_feature 1..20: note = Description of Artificial Sequence: Synthetic oligonucleotide
  misc_feature 1..20: note = Target: ANGPTL4; (+) strand; PAM type: YTN; PAM sequence: TTC
  source 1..20: mol_type = other DNA
actcctgagccagtgaaacc

SEQ ID NO: 18673 - DNA, 20 bp, synthetic construct
  misc_feature 1..20: note = Description of Artificial Sequence: Synthetic oligonucleotide
  misc_feature 1..20: note = Target: ANGPTL4; (+) strand; PAM type: YTN; PAM sequence: CTC
  source 1..20: mol_type = other DNA
ctgagccagtgaaaccatga

SEQ ID NO: 18674 - DNA, 20 bp, synthetic construct
  misc_feature 1..20: note = Description of Artificial Sequence: Synthetic oligonucleotide
  misc_feature 1..20: note = Target: ANGPTL4; (+) strand; PAM type: YTN; PAM sequence: CTG
  source 1..20: mol_type = other DNA
agccagtgaaaccatgaacc

SEQ ID NO: 18675 - DNA, 20 bp, synthetic construct
  misc_feature 1..20: note = Description of Artificial Sequence: Synthetic oligonucleotide
  misc_feature 1..20: note = Target: ANGPTL4; (+) strand; PAM type: YTN; PAM sequence: CTG
  source 1..20: mol_type = other DNA
aacacacctgaacatcagaa

SEQ ID NO: 18676 - DNA, 20 bp, synthetic construct
  misc_feature 1..20: note = Description of Artificial Sequence: Synthetic oligonucleotide
  misc_feature 1..20: note = Target: ANGPTL4; (+) strand; PAM type: YTN; PAM sequence: CTG
  source 1..20: mol_type = other DNA
aacatcagaagaaacaaact

SEQ ID NO: 18677 - DNA, 20 bp, synthetic construct
  misc_feature 1..20: note = Description of Artificial Sequence: Synthetic oligonucleotide
  misc_feature 1..20: note = Target: ANGPTL4; (+) strand; PAM type: YTN; PAM sequence: CTC
  source 1..20: mol_type = other DNA
cagacgcgccaccttaagag

SEQ ID NO: 18678 - DNA, 20 bp, synthetic construct
  misc_feature 1..20: note = Description of Artificial Sequence: Synthetic oligonucleotide
  misc_feature 1..20: note = Target: ANGPTL4; (+) strand; PAM type: YTN; PAM sequence: CTT
  source 1..20: mol_type = other DNA
aagagctggaacacttaccg

SEQ ID NO: 18679 - DNA, 20 bp, synthetic construct
  misc_feature 1..20: note = Description of Artificial Sequence: Synthetic oligonucleotide
  misc_feature 1..20: note = Target: ANGPTL4; (+) strand; PAM type: YTN; PAM sequence: TTA
  source 1..20: mol_type = other DNA
agagctggaacacttaccgc

SEQ ID NO: 18680 - DNA, 20 bp, synthetic construct
  misc_feature 1..20: note = Description of Artificial Sequence: Synthetic oligonucleotide
  misc_feature 1..20: note = Target: ANGPTL4; (+) strand; PAM type: YTN; PAM sequence: CTG
  source 1..20: mol_type = other DNA
gaacacttaccgcaagggtc

SEQ ID NO: 18681 - DNA, 20 bp, synthetic construct
  misc_feature 1..20: note = Description of Artificial Sequence: Synthetic oligonucleotide
  misc_feature 1..20: note = Target: ANGPTL4; (+) strand; PAM type: YTN; PAM sequence: CTT
  source 1..20: mol_type = other DNA
accgcaagggtccatggctt

SEQ ID NO: 18682 - DNA, 20 bp, synthetic construct
  misc_feature 1..20: note = Description of Artificial Sequence: Synthetic oligonucleotide
  misc_feature 1..20: note = Target: ANGPTL4; (+) strand; PAM type: YTN; PAM sequence: TTA
  source 1..20: mol_type = other DNA
ccgcaagggtccatggcttc

SEQ ID NO: 18683 - DNA, 20 bp, synthetic construct
  misc_feature 1..20: note = Description of Artificial Sequence: Synthetic oligonucleotide
  misc_feature 1..20: note = Target: ANGPTL4; (+) strand; PAM type: YTN; PAM sequence: CTT
  source 1..20: mol_type = other DNA
cattcttgaagtcagtgaga

SEQ ID NO: 18684 - DNA, 20 bp, synthetic construct
  misc_feature 1..20: note = Description of Artificial Sequence: Synthetic oligonucleotide
  misc_feature 1..20: note = Target: ANGPTL4; (+) strand; PAM type: YTN; PAM sequence: TTC
  source 1..20: mol_type = other DNA
attcttgaagtcagtgagac

SEQ ID NO: 18685 - DNA, 20 bp, synthetic construct
  misc_feature 1..20: note = Description of Artificial Sequence: Synthetic oligonucleotide
  misc_feature 1..20: note = Target: ANGPTL4; (+) strand; PAM type: YTN; PAM sequence: TTC
  source 1..20: mol_type = other DNA
ttgaagtcagtgagaccaag

SEQ ID NO: 18686 - DNA, 20 bp, synthetic construct
  misc_feature 1..20: note = Description of Artificial Sequence: Synthetic oligonucleotide
  misc_feature 1..20: note = Target: ANGPTL4; (+) strand; PAM type: YTN; PAM sequence: CTT
  source 1..20: mol_type = other DNA
gaagtcagtgagaccaagaa

SEQ ID NO: 18687 - DNA, 20 bp, synthetic construct
  misc_feature 1..20: note = Description of Artificial Sequence: Synthetic oligonucleotide
  misc_feature 1..20: note = Target: ANGPTL4; (+) strand; PAM type: YTN; PAM sequence: TTG
  source 1..20: mol_type = other DNA
aagtcagtgagaccaagaac

SEQ ID NO: 18688 - DNA, 20 bp, synthetic construct
  misc_feature 1..20: note = Description of Artificial Sequence: Synthetic oligonucleotide
  misc_feature 1..20: note = Target: ANGPTL4; (+) strand; PAM type: YTN; PAM sequence: TTC
  source 1..20: mol_type = other DNA
cggatacagtgccactgcac

SEQ ID NO: 18689 - DNA, 20 bp, synthetic construct
  misc_feature 1..20: note = Description of Artificial Sequence: Synthetic oligonucleotide
  misc_feature 1..20: note = Target: ANGPTL4; (+) strand; PAM type: YTN; PAM sequence: CTG
  source 1..20: mol_type = other DNA
cactccagcccaggcaacag

SEQ ID NO: 18690 - DNA, 20 bp, synthetic construct
  misc_feature 1..20: note = Description of Artificial Sequence: Synthetic oligonucleotide
  misc_feature 1..20: note = Target: ANGPTL4; (+) strand; PAM type: YTN; PAM sequence: CTC
  source 1..20: mol_type = other DNA
cagcccaggcaacagagcga

SEQ ID NO: 18691 - DNA, 20 bp, synthetic construct
  misc_feature 1..20: note = Description of Artificial Sequence: Synthetic oligonucleotide
  misc_feature 1..20: note = Target: ANGPTL4; (+) strand; PAM type: YTN; PAM sequence: TTC
  source 1..20: mol_type = other DNA
tgtctaaaaaataaataaat

SEQ ID NO: 18692 - DNA, 20 bp, synthetic construct
  misc_feature 1..20: note = Description of Artificial Sequence: Synthetic oligonucleotide
  misc_feature 1..20: note = Target: ANGPTL4; (+) strand; PAM type: YTN; PAM sequence: CTG
  source 1..20: mol_type = other DNA
tctaaaaaataaataaataa

SEQ ID NO: 18693 - DNA, 20 bp, synthetic construct
  misc_feature 1..20: note = Description of Artificial Sequence: Synthetic oligonucleotide
  misc_feature 1..20: note = Target: ANGPTL4; (+) strand; PAM type: YTN; PAM sequence: CTA
  source 1..20: mol_type = other DNA
aaaaataaataaataaatat

SEQ ID NO: 18694 - DNA, 20 bp, synthetic construct
  misc_feature 1..20: note = Description of Artificial Sequence: Synthetic oligonucleotide
  misc_feature 1..20: note = Target: ANGPTL4; (+) strand; PAM type: YTN; PAM sequence: TTG
  source 1..20: mol_type = other DNA
taataattggataccctaca

SEQ ID NO: 18695 - DNA, 20 bp, synthetic construct
  misc_feature 1..20: note = Description of Artificial Sequence: Synthetic oligonucleotide
  misc_feature 1..20: note = Target: ANGPTL4; (+) strand; PAM type: YTN; PAM sequence: TTG
  source 1..20: mol_type = other DNA
gataccctacatctaggaca

SEQ ID NO: 18696 - DNA, 20 bp, synthetic construct
  misc_feature 1..20: note = Description of Artificial Sequence: Synthetic oligonucleotide
  misc_feature 1..20: note = Target: ANGPTL4; (+) strand; PAM type: YTN; PAM sequence: CTA
  source 1..20: mol_type = other DNA
catctaggacatgtatttga

SEQ ID NO: 18697 - DNA, 20 bp, synthetic construct
  misc_feature 1..20: note = Description of Artificial Sequence: Synthetic oligonucleotide
  misc_feature 1..20: note = Target: ANGPTL4; (+) strand; PAM type: YTN; PAM sequence: CTA
  source 1..20: mol_type = other DNA
ggacatgtatttgaggaaaa

SEQ ID NO: 18698 - DNA, 20 bp, synthetic construct
  misc_feature 1..20: note = Description of Artificial Sequence: Synthetic oligonucleotide
  misc_feature 1..20: note = Target: ANGPTL4; (+) strand; PAM type: YTN; PAM sequence: TTT
  source 1..20: mol_type = other DNA
gaggaaaaccacatctgtcc

SEQ ID NO: 18699 - DNA, 20 bp, synthetic construct
  misc_feature 1..20: note = Description of Artificial Sequence: Synthetic oligonucleotide
  misc_feature 1..20: note = Target: ANGPTL4; (+) strand; PAM type: YTN; PAM sequence: TTG
  source 1..20: mol_type = other DNA
aggaaaaccacatctgtcca

SEQ ID NO: 18700 - DNA, 20 bp, synthetic construct
  misc_feature 1..20: note = Description of Artificial Sequence: Synthetic oligonucleotide
  misc_feature 1..20: note = Target: ANGPTL4; (+) strand; PAM type: YTN; PAM sequence: CTG
  source 1..20: mol_type = other DNA
tccattttctgaaccccagc

SEQ ID NO: 18701 - DNA, 20 bp, synthetic construct
  misc_feature 1..20: note = Description of Artificial Sequence: Synthetic oligonucleotide
  misc_feature 1..20: note = Target: ANGPTL4; (+) strand; PAM type: YTN; PAM sequence: TTT
  source 1..20: mol_type = other DNA
tctgaaccccagctgctgtt

SEQ ID NO: 18702 - DNA, 20 bp, synthetic construct
  misc_feature 1..20: note = Description of Artificial Sequence: Synthetic oligonucleotide
  misc_feature 1..20: note = Target: ANGPTL4; (+) strand; PAM type: YTN; PAM sequence: TTT
  source 1..20: mol_type = other DNA
ctgaaccccagctgctgtta

SEQ ID NO: 18703 - DNA, 20 bp, synthetic construct
  misc_feature 1..20: note = Description of Artificial Sequence: Synthetic oligonucleotide
  misc_feature 1..20: note = Target: ANGPTL4; (+) strand; PAM type: YTN; PAM sequence: TTC
  source 1..20: mol_type = other DNA
tgaaccccagctgctgttaa

SEQ ID NO: 18704 - DNA, 20 bp, synthetic construct
  misc_feature 1..20: note = Description of Artificial Sequence: Synthetic oligonucleotide
  misc_feature 1..20: note = Target: ANGPTL4; (+) strand; PAM type: YTN; PAM sequence: CTG
  source 1..20: mol_type = other DNA
aaccccagctgctgttaatt

SEQ ID NO: 18705 - DNA, 20 bp, synthetic construct
  misc_feature 1..20: note = Description of Artificial Sequence: Synthetic oligonucleotide
  misc_feature 1..20: note = Target: ANGPTL4; (+) strand; PAM type: YTN; PAM sequence: CTG
  source 1..20: mol_type = other DNA
ctgttaattttttttttttt

SEQ ID NO: 18706 - DNA, 20 bp, synthetic construct
  misc_feature 1..20: note = Description of Artificial Sequence: Synthetic oligonucleotide
  misc_feature 1..20: note = Target: ANGPTL4; (+) strand; PAM type: YTN; PAM sequence: CTG
  source 1..20: mol_type = other DNA
ttaatttttttttttttttt

SEQ ID NO: 18707 - DNA, 20 bp, synthetic construct
  misc_feature 1..20: note = Description of Artificial Sequence: Synthetic oligonucleotide
  misc_feature 1..20: note = Target: ANGPTL4; (+) strand; PAM type: YTN; PAM sequence: TTA
  source 1..20: mol_type = other DNA
attttttttttttttttttc

SEQ ID NO: 18708 - DNA, 20 bp, synthetic construct
  misc_feature 1..20: note = Description of Artificial Sequence: Synthetic oligonucleotide
  misc_feature 1..20: note = Target: ANGPTL4; (+) strand; PAM type: YTN; PAM sequence: TTT
  source 1..20: mol_type = other DNA
tttttttttttttttccgag

SEQ ID NO: 18709 - DNA, 20 bp, synthetic construct
  misc_feature 1..20: note = Description of Artificial Sequence: Synthetic oligonucleotide
  misc_feature 1..20: note = Target: ANGPTL4; (+) strand; PAM type: YTN; PAM sequence: TTT
  source 1..20: mol_type = other DNA
ttttttttttttttccgaga

SEQ ID NO: 18710 - DNA, 20 bp, synthetic construct
  misc_feature 1..20: note = Description of Artificial Sequence: Synthetic oligonucleotide
  misc_feature 1..20: note = Target: ANGPTL4; (+) strand; PAM type: YTN; PAM sequence: TTT
  source 1..20: mol_type = other DNA
tttttttttttttccgagac

SEQ ID NO: 18711 - DNA, 20 bp, synthetic construct
  misc_feature 1..20: note = Description of Artificial Sequence: Synthetic oligonucleotide
  misc_feature 1..20: note = Target: ANGPTL4; (+) strand; PAM type: YTN; PAM sequence: TTT
  source 1..20: mol_type = other DNA
ttttttttttttccgagaca

SEQ ID NO: 18712 - DNA, 20 bp, synthetic construct
  misc_feature 1..20: note = Description of Artificial Sequence: Synthetic oligonucleotide
  misc_feature 1..20: note = Target: ANGPTL4; (+) strand; PAM type: YTN; PAM sequence: TTT
  source 1..20: mol_type = other DNA
tttttttttttccgagacaa

SEQ ID NO: 18713 - DNA, 20 bp, synthetic construct
  misc_feature 1..20: note = Description of Artificial Sequence: Synthetic oligonucleotide
  misc_feature 1..20: note = Target: ANGPTL4; (+) strand; PAM type: YTN; PAM sequence: TTT
  source 1..20: mol_type = other DNA
ttttttttttccgagacaag

SEQ ID NO: 18714 - DNA, 20 bp, synthetic construct
  misc_feature 1..20: note = Description of Artificial Sequence: Synthetic oligonucleotide
  misc_feature 1..20: note = Target: ANGPTL4; (+) strand; PAM type: YTN; PAM sequence: TTT
  source 1..20: mol_type = other DNA
tttttttttccgagacaaga

SEQ ID NO: 18715 - DNA, 20 bp, synthetic construct
  misc_feature 1..20: note = Description of Artificial Sequence: Synthetic oligonucleotide
  misc_feature 1..20: note = Target: ANGPTL4; (+) strand; PAM type: YTN; PAM sequence: TTT
  source 1..20: mol_type = other DNA
ttttttttccgagacaagag

SEQ ID NO: 18716 - DNA, 20 bp, synthetic construct
  misc_feature 1..20: note = Description of Artificial Sequence: Synthetic oligonucleotide
  misc_feature 1..20: note = Target: ANGPTL4; (+) strand; PAM type: YTN; PAM sequence: TTT
  source 1..20: mol_type = other DNA
tttttttccgagacaagagt

SEQ ID NO: 18717 - DNA, 20 bp, synthetic construct
  misc_feature 1..20: note = Description of Artificial Sequence: Synthetic oligonucleotide
  misc_feature 1..20: note = Target: ANGPTL4; (+) strand; PAM type: YTN; PAM sequence: TTT
  source 1..20: mol_type = other DNA
ttttttccgagacaagagtc

SEQ ID NO: 18718 - DNA, 20 bp, synthetic construct
  misc_feature 1..20: note = Description of Artificial Sequence: Synthetic oligonucleotide
  misc_feature 1..20: note = Target: ANGPTL4; (+) strand; PAM type: YTN; PAM sequence: TTT
  source 1..20: mol_type = other DNA
tttttccgagacaagagtct

SEQ ID NO: 18719 - DNA, 20 bp, synthetic construct
  misc_feature 1..20: note = Description of Artificial Sequence: Synthetic oligonucleotide
  misc_feature 1..20: note = Target: ANGPTL4; (+) strand; PAM type: YTN; PAM sequence: TTT
  source 1..20: mol_type = other DNA
ttttccgagacaagagtctc

SEQ ID NO: 18720 - DNA, 20 bp, synthetic construct
  misc_feature 1..20: note = Description of Artificial Sequence: Synthetic oligonucleotide
  misc_feature 1..20: note = Target: ANGPTL4; (+) strand; PAM type: YTN; PAM sequence: TTT
  source 1..20: mol_type = other DNA
tttccgagacaagagtctca

SEQ ID NO: 18721 - DNA, 20 bp, synthetic construct
  misc_feature 1..20: note = Description of Artificial Sequence: Synthetic oligonucleotide
  misc_feature 1..20: note = Target: ANGPTL4; (+) strand; PAM type: YTN; PAM sequence: TTT
  source 1..20: mol_type = other DNA
ttccgagacaagagtctcac

SEQ ID NO: 18722 - DNA, 20 bp, synthetic construct
  misc_feature 1..20: note = Description of Artificial Sequence: Synthetic oligonucleotide
  misc_feature 1..20: note = Target: ANGPTL4; (+) strand; PAM type: YTN; PAM sequence: TTT
  source 1..20: mol_type = other DNA
tccgagacaagagtctcact

SEQ ID NO: 18723 - DNA, 20 bp, synthetic construct
  misc_feature 1..20: note = Description of Artificial Sequence: Synthetic oligonucleotide
  misc_feature 1..20: note = Target: ANGPTL4; (+) strand; PAM type: YTN; PAM sequence: TTT
  source 1..20: mol_type = other DNA
ccgagacaagagtctcactc

SEQ ID NO: 18724 - DNA, 20 bp, synthetic construct
  misc_feature 1..20: note = Description of Artificial Sequence: Synthetic oligonucleotide
  misc_feature 1..20: note = Target: ANGPTL4; (+) strand; PAM type: YTN; PAM sequence: TTC
  source 1..20: mol_type = other DNA
cgagacaagagtctcactct

SEQ ID NO: 18725 - DNA, 20 bp, synthetic construct
  misc_feature 1..20: note = Description of Artificial Sequence: Synthetic oligonucleotide
  misc_feature 1..20: note = Target: ANGPTL4; (+) strand; PAM type: YTN; PAM sequence: CTC
  source 1..20: mol_type = other DNA
actctgtcacccaggctgga

SEQ ID NO: 18726 - DNA, 20 bp, synthetic construct
  misc_feature 1..20: note = Description of Artificial Sequence: Synthetic oligonucleotide
  misc_feature 1..20: note = Target: ANGPTL4; (+) strand; PAM type: YTN; PAM sequence: CTC
  source 1..20: mol_type = other DNA
tgtcacccaggctggagcgc

SEQ ID NO: 18727 - DNA, 20 bp, synthetic construct
  misc_feature 1..20: note = Description of Artificial Sequence: Synthetic oligonucleotide
  misc_feature 1..20: note = Target: ANGPTL4; (+) strand; PAM type: YTN; PAM sequence: CTG
  source 1..20: mol_type = other DNA
tcacccaggctggagcgcgg

SEQ ID NO: 18728 - DNA, 20 bp, synthetic construct
  misc_feature 1..20: note = Description of Artificial Sequence: Synthetic oligonucleotide
  misc_feature 1..20: note = Target: ANGPTL4; (+) strand; PAM type: YTN; PAM sequence: CTG
  source 1..20: mol_type = other DNA
gagcgcggtagtgcgatctc

SEQ ID NO: 18729 - DNA, 20 bp, synthetic construct
  misc_feature 1..20: note = Description of Artificial Sequence: Synthetic oligonucleotide
  misc_feature 1..20: note = Target: ANGPTL4; (+) strand; PAM type: YTN; PAM sequence: CTC
  source 1..20: mol_type = other DNA
agcttactgcaacctccacc

SEQ ID NO: 18730 - DNA, 20 bp, synthetic construct
  misc_feature 1..20: note = Description of Artificial Sequence: Synthetic oligonucleotide
  misc_feature 1..20: note = Target: ANGPTL4; (+) strand; PAM type: YTN; PAM sequence: CTT
  source 1..20: mol_type = other DNA
actgcaacctccacctcccg

SEQ ID NO: 18731 - DNA, 20 bp, synthetic construct
  misc_feature 1..20: note = Description of Artificial Sequence: Synthetic oligonucleotide
  misc_feature 1..20: note = Target: ANGPTL4; (+) strand; PAM type: YTN; PAM sequence: TTA
  source 1..20: mol_type = other DNA
ctgcaacctccacctcccgg

SEQ ID NO: 18732 - DNA, 20 bp, synthetic construct
  misc_feature 1..20: note = Description of Artificial Sequence: Synthetic oligonucleotide
  misc_feature 1..20: note = Target: ANGPTL4; (+) strand; PAM type: YTN; PAM sequence: CTG
  source 1..20: mol_type = other DNA
caacctccacctcccgggtt

SEQ ID NO: 18733 - DNA, 20 bp, synthetic construct
  misc_feature 1..20: note = Description of Artificial Sequence: Synthetic oligonucleotide
  misc_feature 1..20: note = Target: ANGPTL4; (+) strand; PAM type: YTN; PAM sequence: CTC
  source 1..20: mol_type = other DNA
cacctcccgggttcaagcga

SEQ ID NO: 18734 - DNA, 20 bp, synthetic construct
  misc_feature 1..20: note = Description of Artificial Sequence: Synthetic oligonucleotide
  misc_feature 1..20: note = Target: ANGPTL4; (+) strand; PAM type: YTN; PAM sequence: CTC
  source 1..20: mol_type = other DNA
ccgggttcaagcgattctcc

SEQ ID NO: 18735 - DNA, 20 bp, synthetic construct
  misc_feature 1..20: note = Description of Artificial Sequence: Synthetic oligonucleotide
  misc_feature 1..20: note = Target: ANGPTL4; (+) strand; PAM type: YTN; PAM sequence: TTC
  source 1..20: mol_type = other DNA
aagcgattctcctgcctcgg

SEQ ID NO: 18736 - DNA, 20 bp, synthetic construct
  misc_feature 1..20: note = Description of Artificial Sequence: Synthetic oligonucleotide
  misc_feature 1..20: note = Target: ANGPTL4; (+) strand; PAM type: YTN; PAM sequence: TTC
  source 1..20: mol_type = other DNA
tcctgcctcggcctcccgag

SEQ ID NO: 18737 - DNA, 20 bp, synthetic construct
  misc_feature 1..20: note = Description of Artificial Sequence: Synthetic oligonucleotide
  misc_feature 1..20: note = Target: ANGPTL4; (+) strand; PAM type: YTN; PAM sequence: CTC
  source 1..20: mol_type = other DNA
ctgcctcggcctcccgagta

SEQ ID NO: 18738 - DNA, 20 bp, synthetic construct
  misc_feature 1..20: note = Description of Artificial Sequence: Synthetic oligonucleotide
  misc_feature 1..20: note = Target: ANGPTL4; (+) strand; PAM type: YTN; PAM sequence: CTG
  source 1..20: mol_type = other DNA
cctcggcctcccgagtagct

SEQ ID NO: 18739 - DNA, 20 bp, synthetic construct
  misc_feature 1..20: note = Description of Artificial Sequence: Synthetic oligonucleotide
  misc_feature 1..20: note = Target: ANGPTL4; (+) strand; PAM type: YTN; PAM sequence: CTC
  source 1..20: mol_type = other DNA
ggcctcccgagtagctgaga

SEQ ID NO: 18740 - DNA, 20 bp, synthetic construct
  misc_feature 1..20: note = Description of Artificial Sequence: Synthetic oligonucleotide
  misc_feature 1..20: note = Target: ANGPTL4; (+) strand; PAM type: YTN; PAM sequence: CTC
  source 1..20: mol_type = other DNA
ccgagtagctgagattacag

SEQ ID NO: 18741 - DNA, 20 bp, synthetic construct
  misc_feature 1..20: note = Description of Artificial Sequence: Synthetic oligonucleotide
  misc_feature 1..20: note = Target: ANGPTL4; (+) strand; PAM type: YTN; PAM sequence: CTG
  source 1..20: mol_type = other DNA
agattacaggcgcctcccac

SEQ ID NO: 18742 - DNA, 20 bp, synthetic construct
  misc_feature 1..20: note = Description of Artificial Sequence: Synthetic oligonucleotide
  misc_feature 1..20: note = Target: ANGPTL4; (+) strand; PAM type: YTN; PAM sequence: TTA
  source 1..20: mol_type = other DNA
caggcgcctcccactgcacc

SEQ ID NO: 18743 - DNA, 20 bp, synthetic construct
  misc_feature 1..20: note = Description of Artificial Sequence: Synthetic oligonucleotide
  misc_feature 1..20: note = Target: ANGPTL4; (+) strand; PAM type: YTN; PAM sequence: CTC
  source 1..20: mol_type = other DNA
ccactgcacccagctaattt

SEQ ID NO: 18744 - DNA, 20 bp, synthetic construct
  misc_feature 1..20: note = Description of Artificial Sequence: Synthetic oligonucleotide
  misc_feature 1..20: note = Target: ANGPTL4; (+) strand; PAM type: YTN; PAM sequence: CTG
  source 1..20: mol_type = other DNA
cacccagctaatttttgtat

SEQ ID NO: 18745 - DNA, 20 bp, synthetic construct
  misc_feature 1..20: note = Description of Artificial Sequence: Synthetic oligonucleotide
  misc_feature 1..20: note = Target: ANGPTL4; (+) strand; PAM type: YTN; PAM sequence: CTA
  source 1..20: mol_type = other DNA
atttttgtatttttagtata

SEQ ID NO: 18746 - DNA, 20 bp, synthetic construct
  misc_feature 1..20: note = Description of Artificial Sequence: Synthetic oligonucleotide
  misc_feature 1..20: note = Target: ANGPTL4; (+) strand; PAM type: YTN; PAM sequence: TTT
  source 1..20: mol_type = other DNA
ttgtatttttagtatagatg

SEQ ID NO: 18747 - DNA, 20 bp, synthetic construct
  misc_feature 1..20: note = Description of Artificial Sequence: Synthetic oligonucleotide
  misc_feature 1..20: note = Target: ANGPTL4; (+) strand; PAM type: YTN; PAM sequence: TTT
  source 1..20: mol_type = other DNA
tgtatttttagtatagatgg

SEQ ID NO: 18748 - DNA, 20 bp, synthetic construct
  misc_feature 1..20: note = Description of Artificial Sequence: Synthetic oligonucleotide
  misc_feature 1..20: note = Target: ANGPTL4; (+) strand; PAM type: YTN; PAM sequence: TTT
  source 1..20: mol_type = other DNA
gtatttttagtatagatggg

SEQ ID NO: 18749 - DNA, 20 bp, synthetic construct
  misc_feature 1..20: note = Description of Artificial Sequence: Synthetic oligonucleotide
  misc_feature 1..20: note = Target: ANGPTL4; (+) strand; PAM type: YTN; PAM sequence: TTG
  source 1..20: mol_type = other DNA
tatttttagtatagatgggt

SEQ ID NO: 18750 - DNA, 20 bp, synthetic construct
  misc_feature 1..20: note = Description of Artificial Sequence: Synthetic oligonucleotide
  misc_feature 1..20: note = Target: ANGPTL4; (+) strand; PAM type: YTN; PAM sequence: TTT
  source 1..20: mol_type = other DNA
ttagtatagatgggtttggc

SEQ ID NO: 18751 - DNA, 20 bp, synthetic construct
  misc_feature 1..20: note = Description of Artificial Sequence: Synthetic oligonucleotide
  misc_feature 1..20: note = Target: ANGPTL4; (+) strand; PAM type: YTN; PAM sequence: TTT
  source 1..20: mol_type = other DNA
tagtatagatgggtttggcc

SEQ ID NO: 18752 - DNA, 20 bp, synthetic construct
  misc_feature 1..20: note = Description of Artificial Sequence: Synthetic oligonucleotide
  misc_feature 1..20: note = Target: ANGPTL4; (+) strand; PAM type: YTN; PAM sequence: TTT
  source 1..20: mol_type = other DNA
agtatagatgggtttggcca

SEQ ID NO: 18753 - DNA, 20 bp, synthetic construct
  misc_feature 1..20: note = Description of Artificial Sequence: Synthetic oligonucleotide
  misc_feature 1..20: note = Target: ANGPTL4; (+) strand; PAM type: YTN; PAM sequence: TTA
  source 1..20: mol_type = other DNA
gtatagatgggtttggccag

SEQ ID NO: 18754 - DNA, 20 bp, synthetic construct
  misc_feature 1..20: note = Description of Artificial Sequence: Synthetic oligonucleotide
  misc_feature 1..20: note = Target: ANGPTL4; (+) strand; PAM type: YTN; PAM sequence: TTT
  source 1..20: mol_type = other DNA
ggccaggctggtctcaaact

SEQ ID NO: 18755 - DNA, 20 bp, synthetic construct
  misc_feature 1..20: note = Description of Artificial Sequence: Synthetic oligonucleotide
  misc_feature 1..20: note = Target: ANGPTL4; (+) strand; PAM type: YTN; PAM sequence: TTG
  source 1..20: mol_type = other DNA
gccaggctggtctcaaactc

SEQ ID NO: 18756 - DNA, 20 bp, synthetic construct
  misc_feature 1..20: note = Description of Artificial Sequence: Synthetic oligonucleotide
  misc_feature 1..20: note = Target: ANGPTL4; (+) strand; PAM type: YTN; PAM sequence: CTG
  source 1..20: mol_type = other DNA
gtctcaaactcctgacctca

SEQ ID NO: 18757 - DNA, 20 bp, synthetic construct
  misc_feature 1..20: note = Description of Artificial Sequence: Synthetic oligonucleotide
  misc_feature 1..20: note = Target: ANGPTL4; (+) strand; PAM type: YTN; PAM sequence: CTC
  source 1..20: mol_type = other DNA
aaactcctgacctcaagtga

SEQ ID NO: 18758 - DNA, 20 bp, synthetic construct
  misc_feature 1..20: note = Description of Artificial Sequence: Synthetic oligonucleotide
  misc_feature 1..20: note = Target: ANGPTL4; (+) strand; PAM type: YTN; PAM sequence: CTC
  source 1..20: mol_type = other DNA
ctgacctcaagtgatctgcc

SEQ ID NO: 18759 - DNA, 20 bp, synthetic construct
  misc_feature 1..20: note = Description of Artificial Sequence: Synthetic oligonucleotide
  misc_feature 1..20: note = Target: ANGPTL4; (+) strand; PAM type: YTN; PAM sequence: CTG
  source 1..20: mol_type = other DNA
acctcaagtgatctgcccgc

SEQ ID NO: 18760 - DNA, 20 bp, synthetic construct
  misc_feature 1..20: note = Description of Artificial Sequence: Synthetic oligonucleotide
  misc_feature 1..20: note = Target: ANGPTL4; (+) strand; PAM type: YTN; PAM sequence: CTC
  source 1..20: mol_type = other DNA
aagtgatctgcccgcctcgg

SEQ ID NO: 18761 - DNA, 20 bp, synthetic construct
  misc_feature 1..20: note = Description of Artificial Sequence: Synthetic oligonucleotide
  misc_feature 1..20: note = Target: ANGPTL4; (+) strand; PAM type: YTN; PAM sequence: CTG
  source 1..20: mol_type = other DNA
cccgcctcggcctccgaaac

SEQ ID NO: 18762 - DNA, 20 bp, synthetic construct
  misc_feature 1..20: note = Description of Artificial Sequence: Synthetic oligonucleotide
  misc_feature 1..20: note = Target: ANGPTL4; (+) strand; PAM type: YTN; PAM sequence: CTC
  source 1..20: mol_type = other DNA
ggcctccgaaactggtggga

SEQ ID NO: 18763 - DNA, 20 bp, synthetic construct
  misc_feature 1..20: note = Description of Artificial Sequence: Synthetic oligonucleotide
  misc_feature 1..20: note = Target: ANGPTL4; (+) strand; PAM type: YTN; PAM sequence: CTC
  source 1..20: mol_type = other DNA
cgaaactggtgggattacag

SEQ ID NO: 18764 - DNA, 20 bp, synthetic construct
  misc_feature 1..20: note = Description of Artificial Sequence: Synthetic oligonucleotide
  misc_feature 1..20: note = Target: ANGPTL4; (+) strand; PAM type: YTN; PAM sequence: CTG
  source 1..20: mol_type = other DNA
gtgggattacaggcgcaagc

SEQ ID NO: 18765 - DNA, 20 bp, synthetic construct
  misc_feature 1..20: note = Description of Artificial Sequence: Synthetic oligonucleotide
  misc_feature 1..20: note = Target: ANGPTL4; (+) strand; PAM type: YTN; PAM sequence: TTA
  source 1..20: mol_type = other DNA
caggcgcaagccactgtgcc

SEQ ID NO: 18766 - DNA, 20 bp, synthetic construct
  misc_feature 1..20: note = Description of Artificial Sequence: Synthetic oligonucleotide
  misc_feature 1..20: note = Target: ANGPTL4; (+) strand; PAM type: YTN; PAM sequence: CTG
  source 1..20: mol_type = other DNA
tgcccggcctgttaatttat

SEQ ID NO: 18767 - DNA, 20 bp, synthetic construct
  misc_feature 1..20: note = Description of Artificial Sequence: Synthetic oligonucleotide
  misc_feature 1..20: note = Target: ANGPTL4; (+) strand; PAM type: YTN; PAM sequence: CTG
  source 1..20: mol_type = other DNA
ttaatttatttttgccccag

SEQ ID NO: 18768 - DNA, 20 bp, synthetic construct
  misc_feature 1..20: note = Description of Artificial Sequence: Synthetic oligonucleotide
  misc_feature 1..20: note = Target: ANGPTL4; (+) strand; PAM type: YTN; PAM sequence: TTA
  source 1..20: mol_type = other DNA
atttatttttgccccagtat

SEQ ID NO: 18769 - DNA, 20 bp, synthetic construct
  misc_feature 1..20: note = Description of Artificial Sequence: Synthetic oligonucleotide
  misc_feature 1..20: note = Target: ANGPTL4; (+) strand; PAM type: YTN; PAM sequence: TTT
  source 1..20: mol_type = other DNA
atttttgccccagtatctcc

SEQ ID NO: 18770 - DNA, 20 bp, synthetic construct
  misc_feature 1..20: note = Description of Artificial Sequence: Synthetic oligonucleotide
  misc_feature 1..20: note = Target: ANGPTL4; (+) strand; PAM type: YTN; PAM sequence: TTA
  source 1..20: mol_type = other DNA
tttttgccccagtatctccc

SEQ ID NO: 18771 - DNA, 20 bp, synthetic construct
  misc_feature 1..20: note = Description of Artificial Sequence: Synthetic oligonucleotide
  misc_feature 1..20: note = Target: ANGPTL4; (+) strand; PAM type: YTN; PAM sequence: TTT
  source 1..20: mol_type = other DNA
ttgccccagtatctccctcc

SEQ ID NO: 18772 - DNA, 20 bp, synthetic construct
  misc_feature 1..20: note = Description of Artificial Sequence: Synthetic oligonucleotide
  misc_feature 1..20: note = Target: ANGPTL4; (+) strand; PAM type: YTN; PAM sequence: TTT
  source 1..20: mol_type = other DNA
tgccccagtatctccctcca

SEQ ID NO: 18773 - DNA, 20 bp, synthetic construct
  misc_feature 1..20: note = Description of Artificial Sequence: Synthetic oligonucleotide
  misc_feature 1..20: note = Target: ANGPTL4; (+) strand; PAM type: YTN; PAM sequence: TTT
  source 1..20: mol_type = other DNA
gccccagtatctccctccaa

SEQ ID NO: 18774 - DNA, 20 bp, synthetic construct
  misc_feature 1..20: note = Description of Artificial Sequence: Synthetic oligonucleotide
  misc_feature 1..20: note = Target: ANGPTL4; (+) strand; PAM type: YTN; PAM sequence: TTG
  source 1..20: mol_type = other DNA
ccccagtatctccctccaaa

SEQ ID NO: 18775 - DNA, 20 bp, synthetic construct
  misc_feature 1..20: note = Description of Artificial Sequence: Synthetic oligonucleotide
  misc_feature 1..20: note = Target: ANGPTL4; (+) strand; PAM type: YTN; PAM sequence: CTC
  source 1..20: mol_type = other DNA
cctccaaatattccttatag

SEQ ID NO: 18776 - DNA, 20 bp, synthetic construct
  misc_feature 1..20: note = Description of Artificial Sequence: Synthetic oligonucleotide
  misc_feature 1..20: note = Target: ANGPTL4; (+) strand; PAM type: YTN; PAM sequence: CTC
  source 1..20: mol_type = other DNA
caaatattccttatagatgt

SEQ ID NO: 18777 - DNA, 20 bp, synthetic construct
  misc_feature 1..20: note = Description of Artificial Sequence: Synthetic oligonucleotide
  misc_feature 1..20: note = Target: ANGPTL4; (+) strand; PAM type: YTN; PAM sequence: TTC
  source 1..20: mol_type = other DNA
cttatagatgtctcttgggg

SEQ ID NO: 18778 - DNA, 20 bp, synthetic construct
  misc_feature 1..20: note = Description of Artificial Sequence: Synthetic oligonucleotide
  misc_feature 1..20: note = Target: ANGPTL4; (+) strand; PAM type: YTN; PAM sequence: CTT
  source 1..20: mol_type = other DNA
atagatgtctcttggggagg

SEQ ID NO: 18779 - DNA, 20 bp, synthetic construct
  misc_feature 1..20: note = Description of Artificial Sequence: Synthetic oligonucleotide
  misc_feature 1..20: note = Target: ANGPTL4; (+) strand; PAM type: YTN; PAM sequence: TTA
  source 1..20: mol_type = other DNA
tagatgtctcttggggaggt

SEQ ID NO: 18780 - DNA, 20 bp, synthetic construct
  misc_feature 1..20: note = Description of Artificial Sequence: Synthetic oligonucleotide
  misc_feature 1..20: note = Target: ANGPTL4; (+) strand; PAM type: YTN; PAM sequence: CTC
  source 1..20: mol_type = other DNA
ttggggaggtggtgggggtt

SEQ ID NO: 18781 - DNA, 20 bp, synthetic construct
  misc_feature 1..20: note = Description of Artificial Sequence: Synthetic oligonucleotide
  misc_feature 1..20: note = Target: ANGPTL4; (+) strand; PAM type: YTN; PAM sequence: CTT
  source 1..20: mol_type = other DNA
ggggaggtggtgggggttct

SEQ ID NO: 18782 - DNA, 20 bp, synthetic construct
  misc_feature 1..20: note = Description of Artificial Sequence: Synthetic oligonucleotide
  misc_feature 1..20: note = Target: ANGPTL4; (+) strand; PAM type: YTN; PAM sequence: TTG
  source 1..20: mol_type = other DNA
gggaggtggtgggggttctt

SEQ ID NO: 18783 - DNA, 20 bp, synthetic construct
  misc_feature 1..20: note = Description of Artificial Sequence: Synthetic oligonucleotide
  misc_feature 1..20: note = Target: ANGPTL4; (+) strand; PAM type: YTN; PAM sequence: TTC
  source 1..20: mol_type = other DNA
ttgcgctagaagaaaaaata

SEQ ID NO: 18784 - DNA, 20 bp, synthetic construct
  misc_feature 1..20: note = Description of Artificial Sequence: Synthetic oligonucleotide
  misc_feature 1..20: note = Target: ANGPTL4; (+) strand; PAM type: YTN; PAM sequence: CTT
  source 1..20: mol_type = other DNA
gcgctagaagaaaaaatatc

SEQ ID NO: 18785 - DNA, 20 bp, synthetic construct
  misc_feature 1..20: note = Description of Artificial Sequence: Synthetic oligonucleotide
  misc_feature 1..20: note = Target: ANGPTL4; (+) strand; PAM type: YTN; PAM sequence: TTG
  source 1..20: mol_type = other DNA
cgctagaagaaaaaatatct

SEQ ID NO: 18786 - DNA, 20 bp, synthetic construct
  misc_feature 1..20: note = Description of Artificial Sequence: Synthetic oligonucleotide
  misc_feature 1..20: note = Target: ANGPTL4; (+) strand; PAM type: YTN; PAM sequence: CTA
  source 1..20: mol_type = other DNA
gaagaaaaaatatctgtgat

SEQ ID NO: 18787 - DNA, 20 bp, synthetic construct
  misc_feature 1..20: note = Description of Artificial Sequence: Synthetic oligonucleotide
  misc_feature 1..20: note = Target: ANGPTL4; (+) strand; PAM type: YTN; PAM sequence: CTG
  source 1..20: mol_type = other DNA
tgatttccttgtcttgaccc

SEQ ID NO: 18788 - DNA, 20 bp, synthetic construct
  misc_feature 1..20: note = Description of Artificial Sequence: Synthetic oligonucleotide
  misc_feature 1..20: note = Target: ANGPTL4; (+) strand; PAM type: YTN; PAM sequence: TTT
  source 1..20: mol_type = other DNA
ccttgtcttgacccttcctg

SEQ ID NO: 18789 - DNA, 20 bp, synthetic construct
  misc_feature 1..20: note = Description of Artificial Sequence: Synthetic oligonucleotide
  misc_feature 1..20: note = Target: ANGPTL4; (+) strand; PAM type: YTN; PAM sequence: TTC
  source 1..20: mol_type = other DNA
cttgtcttgacccttcctgg

SEQ ID NO: 18790 - DNA, 20 bp, synthetic construct
  misc_feature 1..20: note = Description of Artificial Sequence: Synthetic oligonucleotide
  misc_feature 1..20: note = Target: ANGPTL4; (+) strand; PAM type: YTN; PAM sequence: CTT
  source 1..20: mol_type = other DNA
gtcttgacccttcctggcag

SEQ ID NO: 18791 - DNA, 20 bp, synthetic construct
  misc_feature 1..20: note = Description of Artificial Sequence: Synthetic oligonucleotide
  misc_feature 1..20: note = Target: ANGPTL4; (+) strand; PAM type: YTN; PAM sequence: TTG
  source 1..20: mol_type = other DNA
tcttgacccttcctggcagg

SEQ ID NO: 18792 - DNA, 20 bp, synthetic construct
  misc_feature 1..20: note = Description of Artificial Sequence: Synthetic oligonucleotide
  misc_feature 1..20: note = Target: ANGPTL4; (+) strand; PAM type: YTN; PAM sequence: CTT
  source 1..20: mol_type = other DNA
gacccttcctggcaggtgct

SEQ ID NO: 18793 - DNA, 20 bp, synthetic construct
  misc_feature 1..20: note = Description of Artificial Sequence: Synthetic oligonucleotide
  misc_feature 1..20: note = Target: ANGPTL4; (+) strand; PAM type: YTN; PAM sequence: TTG
  source 1..20: mol_type = other DNA
acccttcctggcaggtgctg

SEQ ID NO: 18794 - DNA, 20 bp, synthetic construct
  misc_feature 1..20: note = Description of Artificial Sequence: Synthetic oligonucleotide
  misc_feature 1..20: note = Target: ANGPTL4; (+) strand; PAM type: YTN; PAM sequence: CTT
  source 1..20: mol_type = other DNA
cctggcaggtgctggggaca

SEQ ID NO: 18795 - DNA, 20 bp, synthetic construct
  misc_feature 1..20: note = Description of Artificial Sequence: Synthetic oligonucleotide
  misc_feature 1..20: note = Target: ANGPTL4; (+) strand; PAM type: YTN; PAM sequence: TTC
  source 1..20: mol_type = other DNA
ctggcaggtgctggggacac

SEQ ID NO: 18796 - DNA, 20 bp, synthetic construct
  misc_feature 1..20: note = Description of Artificial Sequence: Synthetic oligonucleotide
  misc_feature 1..20: note = Target: ANGPTL4; (+) strand; PAM type: YTN; PAM sequence: CTG
  source 1..20: mol_type = other DNA
gcaggtgctggggacacagc

SEQ ID NO: 18797 - DNA, 20 bp, synthetic construct
  misc_feature 1..20: note = Description of Artificial Sequence: Synthetic oligonucleotide
  misc_feature 1..20: note = Target: ANGPTL4; (+) strand; PAM type: YTN; PAM sequence: CTG
  source 1..20: mol_type = other DNA
gggacacagctgtttccctg

SEQ ID NO: 18798 - DNA, 20 bp, synthetic construct
  misc_feature 1..20: note = Description of Artificial Sequence: Synthetic oligonucleotide
  misc_feature 1..20: note = Target: ANGPTL4; (+) strand; PAM type: YTN; PAM sequence: CTG
  source 1..20: mol_type = other DNA
tttccctggggctgtggctg

SEQ ID NO: 18799 - DNA, 20 bp, synthetic construct
  misc_feature 1..20: note = Description of Artificial Sequence: Synthetic oligonucleotide
  misc_feature 1..20: note = Target: ANGPTL4; (+) strand; PAM type: YTN; PAM sequence: TTT
  source 1..20: mol_type = other DNA
ccctggggctgtggctgggt

SEQ ID NO: 18800 - DNA, 20 bp, synthetic construct
  misc_feature 1..20: note = Description of Artificial Sequence: Synthetic oligonucleotide
  misc_feature 1..20: note = Target: ANGPTL4; (+) strand; PAM type: YTN; PAM sequence: TTC
  source 1..20: mol_type = other DNA
cctggggctgtggctgggta

SEQ ID NO: 18801 - DNA, 20 bp, synthetic construct
  misc_feature 1..20: note = Description of Artificial Sequence: Synthetic oligonucleotide
  misc_feature 1..20: note = Target: ANGPTL4; (+) strand; PAM type: YTN; PAM sequence: CTG
  source 1..20: mol_type = other DNA
gggctgtggctgggtatagg

SEQ ID NO: 18802 - DNA, 20 bp, synthetic construct
  misc_feature 1..20: note = Description of Artificial Sequence: Synthetic oligonucleotide
  misc_feature 1..20: note = Target: ANGPTL4; (+) strand; PAM type: YTN; PAM sequence: CTG
  source 1..20: mol_type = other DNA
tggctgggtataggtgacaa

SEQ ID NO: 18803 - DNA, 20 bp, synthetic construct
  misc_feature 1..20: note = Description of Artificial Sequence: Synthetic oligonucleotide
  misc_feature 1..20: note = Target: ANGPTL4; (+) strand; PAM type: YTN; PAM sequence: CTG
  source 1..20: mol_type = other DNA
ggtataggtgacaaactttt

SEQ ID NO: 18804 - DNA, 20 bp, synthetic construct
  misc_feature 1..20: note = Description of Artificial Sequence: Synthetic oligonucleotide
  misc_feature 1..20: note = Target: ANGPTL4; (+) strand; PAM type: YTN; PAM sequence: CTT
  source 1..20: mol_type = other DNA
tttagctttgtagaggtagg

SEQ ID NO: 18805 - DNA, 20 bp, synthetic construct
  misc_feature 1..20: note = Description of Artificial Sequence: Synthetic oligonucleotide
  misc_feature 1..20: note = Target: ANGPTL4; (+) strand; PAM type: YTN; PAM sequence: TTT
  source 1..20: mol_type = other DNA
ttagctttgtagaggtaggt

SEQ ID NO: 18806 - DNA, 20 bp, synthetic construct
  misc_feature 1..20: note = Description of Artificial Sequence: Synthetic oligonucleotide
  misc_feature 1..20: note = Target: ANGPTL4; (+) strand; PAM type: YTN; PAM sequence: TTT
  source 1..20: mol_type = other DNA
tagctttgtagaggtaggtc

SEQ ID NO: 18807 - DNA, 20 bp, synthetic construct
  misc_feature 1..20: note = Description of Artificial Sequence: Synthetic oligonucleotide
  misc_feature 1..20: note = Target: ANGPTL4; (+) strand; PAM type: YTN; PAM sequence: TTT
  source 1..20: mol_type = other DNA
agctttgtagaggtaggtcc

SEQ ID NO: 18808 - DNA, 20 bp, synthetic construct
  misc_feature 1..20: note = Description of Artificial Sequence: Synthetic oligonucleotide
  misc_feature 1..20: note = Target: ANGPTL4; (+) strand; PAM type: YTN; PAM sequence: TTA
  source 1..20: mol_type = other DNA
gctttgtagaggtaggtcct

SEQ ID NO: 18809 - DNA, 20 bp, synthetic construct
  misc_feature 1..20: note = Description of Artificial Sequence: Synthetic oligonucleotide
  misc_feature 1..20: note = Target: ANGPTL4; (+) strand; PAM type: YTN; PAM sequence: CTT
  source 1..20: mol_type = other DNA
tgtagaggtaggtcctacag

SEQ ID NO: 18810 - DNA, 20 bp, synthetic construct
  misc_feature 1..20: note = Description of Artificial Sequence: Synthetic oligonucleotide
  misc_feature 1..20: note = Target: ANGPTL4; (+) strand; PAM type: YTN; PAM sequence: TTT
  source 1..20: mol_type = other DNA
gtagaggtaggtcctacagc

SEQ ID NO: 18811 - DNA, 20 bp, synthetic construct
  misc_feature 1..20: note = Description of Artificial Sequence: Synthetic oligonucleotide
  misc_feature 1..20: note = Target: ANGPTL4; (+) strand; PAM type: YTN; PAM sequence: TTG
  source 1..20: mol_type = other DNA
tagaggtaggtcctacagct

SEQ ID NO: 18812 - DNA, 20 bp, synthetic construct
  misc_feature 1..20: note = Description of Artificial Sequence: Synthetic oligonucleotide
  misc_feature 1..20: note = Target: ANGPTL4; (+) strand; PAM type: YTN; PAM sequence: CTA
  source 1..20: mol_type = other DNA
cagctgccaggccagggagg

SEQ ID NO: 18813 - DNA, 20 bp, synthetic construct
  misc_feature 1..20: note = Description of Artificial Sequence: Synthetic oligonucleotide
  misc_feature 1..20: note = Target: ANGPTL4; (+) strand; PAM type: YTN; PAM sequence: CTG
  source 1..20: mol_type = other DNA
ccaggccagggaggctagag

SEQ ID NO: 18814 - DNA, 20 bp, synthetic construct
  misc_feature 1..20: note = Description of Artificial Sequence: Synthetic oligonucleotide
  misc_feature 1..20: note = Target: ANGPTL4; (+) strand; PAM type: YTN; PAM sequence: CTA
  source 1..20: mol_type = other DNA
gaggctgccctctccaggtt

SEQ ID NO: 18815 - DNA, 20 bp, synthetic construct
  misc_feature 1..20: note = Description of Artificial Sequence: Synthetic oligonucleotide
  misc_feature 1..20: note = Target: ANGPTL4; (+) strand; PAM type: YTN; PAM sequence: CTG
  source 1..20: mol_type = other DNA
ccctctccaggttccttgtt

SEQ ID NO: 18816 - DNA, 20 bp, synthetic construct
  misc_feature 1..20: note = Description of Artificial Sequence: Synthetic oligonucleotide
  misc_feature 1..20: note = Target: ANGPTL4; (+) strand; PAM type: YTN; PAM sequence: CTC
  source 1..20: mol_type = other DNA
tccaggttccttgtttgcct

SEQ ID NO: 18817 - DNA, 20 bp, synthetic construct
  misc_feature 1..20: note = Description of Artificial Sequence: Synthetic oligonucleotide
  misc_feature 1..20: note = Target: ANGPTL4; (+) strand; PAM type: YTN; PAM sequence: CTC
  source 1..20: mol_type = other DNA
caggttccttgtttgcctgt

SEQ ID NO: 18818 - DNA, 20 bp, synthetic construct
  misc_feature 1..20: note = Description of Artificial Sequence: Synthetic oligonucleotide
  misc_feature 1..20: note = Target: ANGPTL4; (+) strand; PAM type: YTN; PAM sequence: TTC
  source 1..20: mol_type = other DNA
cttgtttgcctgtgtcctgt

SEQ ID NO: 18819 - DNA, 20 bp, synthetic construct
  misc_feature 1..20: note = Description of Artificial Sequence: Synthetic oligonucleotide
  misc_feature 1..20: note = Target: ANGPTL4; (+) strand; PAM type: YTN; PAM sequence: CTT
  source 1..20: mol_type = other DNA
gtttgcctgtgtcctgtact

SEQ ID NO: 18820 - DNA, 20 bp, synthetic construct
  misc_feature 1..20: note = Description of Artificial Sequence: Synthetic oligonucleotide
  misc_feature 1..20: note = Target: ANGPTL4; (+) strand; PAM type: YTN; PAM sequence: TTG
  source 1..20: mol_type = other DNA
tttgcctgtgtcctgtactg

SEQ ID NO: 18821 - DNA, 20 bp, synthetic construct
  misc_feature 1..20: note = Description of Artificial Sequence: Synthetic oligonucleotide
  misc_feature 1..20: note = Target: ANGPTL4; (+) strand; PAM type: YTN; PAM sequence: TTT
  source 1..20: mol_type = other DNA
gcctgtgtcctgtactgagc

SEQ ID NO: 18822 - DNA, 20 bp, synthetic construct
  misc_feature 1..20: note = Description of Artificial Sequence: Synthetic oligonucleotide
  misc_feature 1..20: note = Target: ANGPTL4; (+) strand; PAM type: YTN; PAM sequence: TTG
  source 1..20: mol_type = other DNA
cctgtgtcctgtactgagca

SEQ ID NO: 18823 - DNA, 20 bp, synthetic construct
  misc_feature 1..20: note = Description of Artificial Sequence: Synthetic oligonucleotide
  misc_feature 1..20: note = Target: ANGPTL4; (+) strand; PAM type: YTN; PAM sequence: CTG
  source 1..20: mol_type = other DNA
tgtcctgtactgagcaggct

SEQ ID NO: 18824 - DNA, 20 bp, synthetic construct
  misc_feature 1..20: note = Description of Artificial Sequence: Synthetic oligonucleotide
  misc_feature 1..20: note = Target: ANGPTL4; (+) strand; PAM type: YTN; PAM sequence: CTG
  source 1..20: mol_type = other DNA
tactgagcaggcttagagga

SEQ ID NO: 18825 - DNA, 20 bp, synthetic construct
  misc_feature 1..20: note = Description of Artificial Sequence: Synthetic oligonucleotide
  misc_feature 1..20: note = Target: ANGPTL4; (+) strand; PAM type: YTN; PAM sequence: CTG
  source 1..20: mol_type = other DNA
agcaggcttagaggatctcc

SEQ ID NO: 18826 - DNA, 20 bp, synthetic construct
  misc_feature 1..20: note = Description of Artificial Sequence: Synthetic oligonucleotide
  misc_feature 1..20: note = Target: ANGPTL4; (+) strand; PAM type: YTN; PAM sequence: CTT
  source 1..20: mol_type = other DNA
agaggatctcctctgagccc

SEQ ID NO: 18827 - DNA, 20 bp, synthetic construct
  misc_feature 1..20: note = Description of Artificial Sequence: Synthetic oligonucleotide
  misc_feature 1..20: note = Target: ANGPTL4; (+) strand; PAM type: YTN; PAM sequence: TTA
  source 1..20: mol_type = other DNA
gaggatctcctctgagccca

SEQ ID NO: 18828 - DNA, 20 bp, synthetic construct
  misc_feature 1..20: note = Description of Artificial Sequence: Synthetic oligonucleotide
  misc_feature 1..20: note = Target: ANGPTL4; (+) strand; PAM type: YTN; PAM sequence: CTC
  source 1..20: mol_type = other DNA
ctctgagcccactgtcactg

SEQ ID NO: 18829 - DNA, 20 bp, synthetic construct
  misc_feature 1..20: note = Description of Artificial Sequence: Synthetic oligonucleotide
  misc_feature 1..20: note = Target: ANGPTL4; (+) strand; PAM type: YTN; PAM sequence: CTC
  source 1..20: mol_type = other DNA
tgagcccactgtcactggag

SEQ ID NO: 18830 - DNA, 20 bp, synthetic construct
  misc_feature 1..20: note = Description of Artificial Sequence: Synthetic oligonucleotide
  misc_feature 1..20: note = Target: ANGPTL4; (+) strand; PAM type: YTN; PAM sequence: CTG
  source 1..20: mol_type = other DNA
agcccactgtcactggagct

SEQ ID NO: 18831 - DNA, 20 bp, synthetic construct
  misc_feature 1..20: note = Description of Artificial Sequence: Synthetic oligonucleotide
  misc_feature 1..20: note = Target: ANGPTL4; (+) strand; PAM type: YTN; PAM sequence: CTG
  source 1..20: mol_type = other DNA
tcactggagctggtggtgag

SEQ ID NO: 18832 - DNA, 20 bp, synthetic construct
  misc_feature 1..20: note = Description of Artificial Sequence: Synthetic oligonucleotide
  misc_feature 1..20: note = Target: ANGPTL4; (+) strand; PAM type: YTN; PAM sequence: CTG
  source 1..20: mol_type = other DNA
gagctggtggtgagtccagt

SEQ ID NO: 18833 - DNA, 20 bp, synthetic construct
  misc_feature 1..20: note = Description of Artificial Sequence: Synthetic oligonucleotide
  misc_feature 1..20: note = Target: ANGPTL4; (+) strand; PAM type: YTN; PAM sequence: CTG
  source 1..20: mol_type = other DNA
gtggtgagtccagtctgcag

SEQ ID NO: 18834 - DNA, 20 bp, synthetic construct
  misc_feature 1..20: note = Description of Artificial Sequence: Synthetic oligonucleotide
  misc_feature 1..20: note = Target: ANGPTL4; (+) strand; PAM type: YTN; PAM sequence: CTG
  source 1..20: mol_type = other DNA
caggagagggggttcctcta

SEQ ID NO: 18835 - DNA, 20 bp, synthetic construct
  misc_feature 1..20: note = Description of Artificial Sequence: Synthetic oligonucleotide
  misc_feature 1..20: note = Target: ANGPTL4; (+) strand; PAM type: YTN; PAM sequence: TTC
  source 1..20: mol_type = other DNA
ctctagccacaccctcttca

SEQ ID NO: 18836 - DNA, 20 bp, synthetic construct
  misc_feature 1..20: note = Description of Artificial Sequence: Synthetic oligonucleotide
  misc_feature 1..20: note = Target: ANGPTL4; (+) strand; PAM type: YTN; PAM sequence: CTC
  source 1..20: mol_type = other DNA
tagccacaccctcttcattt

SEQ ID NO: 18837 - DNA, 20 bp, synthetic construct
  misc_feature 1..20: note = Description of Artificial Sequence: Synthetic oligonucleotide
  misc_feature 1..20: note = Target: ANGPTL4; (+) strand; PAM type: YTN; PAM sequence: CTA
  source 1..20: mol_type = other DNA
gccacaccctcttcatttcc

SEQ ID NO: 18838 - DNA, 20 bp, synthetic construct
  misc_feature 1..20: note = Description of Artificial Sequence: Synthetic oligonucleotide
  misc_feature 1..20: note = Target: ANGPTL4; (+) strand; PAM type: YTN; PAM sequence: CTC
  source 1..20: mol_type = other DNA
ttcatttccaggctctgcca

SEQ ID NO: 18839 - DNA, 20 bp, synthetic construct
  misc_feature 1..20: note = Description of Artificial Sequence: Synthetic oligonucleotide
  misc_feature 1..20: note = Target: ANGPTL4; (+) strand; PAM type: YTN; PAM sequence: CTT
  source 1..20: mol_type = other DNA
catttccaggctctgccaat

SEQ ID NO: 18840 - DNA, 20 bp, synthetic construct
  misc_feature 1..20: note = Description of Artificial Sequence: Synthetic oligonucleotide
  misc_feature 1..20: note = Target: ANGPTL4; (+) strand; PAM type: YTN; PAM sequence: TTC
  source 1..20: mol_type = other DNA
atttccaggctctgccaatg

SEQ ID NO: 18841 - DNA, 20 bp, synthetic construct
  misc_feature 1..20: note = Description of Artificial Sequence: Synthetic oligonucleotide
  misc_feature 1..20: note = Target: ANGPTL4; (+) strand; PAM type: YTN; PAM sequence: TTT
  source 1..20: mol_type = other DNA
ccaggctctgccaatgatgg

SEQ ID NO: 18842 - DNA, 20 bp, synthetic construct
  misc_feature 1..20: note = Description of Artificial Sequence: Synthetic oligonucleotide
  misc_feature 1..20: note = Target: ANGPTL4; (+) strand; PAM type: YTN; PAM sequence: TTC
  source 1..20: mol_type = other DNA
caggctctgccaatgatggg

SEQ ID NO: 18843 - DNA, 20 bp, synthetic construct
  misc_feature 1..20: note = Description of Artificial Sequence: Synthetic oligonucleotide
  misc_feature 1..20: note = Target: ANGPTL4; (+) strand; PAM type: YTN; PAM sequence: CTC
  source 1..20: mol_type = other DNA
tgccaatgatgggctcatct

SEQ ID NO: 18844 - DNA, 20 bp, synthetic construct
  misc_feature 1..20: note = Description of Artificial Sequence: Synthetic oligonucleotide
  misc_feature 1..20: note = Target: ANGPTL4; (+) strand; PAM type: YTN; PAM sequence: CTG
  source 1..20: mol_type = other DNA
ccaatgatgggctcatctct

SEQ ID NO: 18845 - DNA, 20 bp, synthetic construct
  misc_feature 1..20: note = Description of Artificial Sequence: Synthetic oligonucleotide
  misc_feature 1..20: note = Target: ANGPTL4; (+) strand; PAM type: YTN; PAM sequence: CTC
  source 1..20: mol_type = other DNA
atctcttcaatgtcatcctt

SEQ ID NO: 18846 - DNA, 20 bp, synthetic construct
  misc_feature 1..20: note = Description of Artificial Sequence: Synthetic oligonucleotide
  misc_feature 1..20: note = Target: ANGPTL4; (+) strand; PAM type: YTN; PAM sequence: CTC
  source 1..20: mol_type = other DNA
ttcaatgtcatcctttttcc

SEQ ID NO: 18847 - DNA, 20 bp, synthetic construct
  misc_feature 1..20: note = Description of Artificial Sequence: Synthetic oligonucleotide
  misc_feature 1..20: note = Target: ANGPTL4; (+) strand; PAM type: YTN; PAM sequence: CTT
  source 1..20: mol_type = other DNA
caatgtcatcctttttcctg

SEQ ID NO: 18848 - DNA, 20 bp, synthetic construct
  misc_feature 1..20: note = Description of Artificial Sequence: Synthetic oligonucleotide
  misc_feature 1..20: note = Target: ANGPTL4; (+) strand; PAM type: YTN; PAM sequence: TTC
  source 1..20: mol_type = other DNA
aatgtcatcctttttcctgc

SEQ ID NO: 18849 - DNA, 20 bp, synthetic construct
  misc_feature 1..20: note = Description of Artificial Sequence: Synthetic oligonucleotide
  misc_feature 1..20: note = Target: ANGPTL4; (+) strand; PAM type: YTN; PAM sequence: CTT
  source 1..20: mol_type = other DNA
tttcctgcagccaccttgac

SEQ ID NO: 18850 - DNA, 20 bp, synthetic construct
  misc_feature 1..20: note = Description of Artificial Sequence: Synthetic oligonucleotide
  misc_feature 1..20: note = Target: ANGPTL4; (+) strand; PAM type: YTN; PAM sequence: TTT
  source 1..20: mol_type = other DNA
ttcctgcagccaccttgacc

SEQ ID NO: 18851 - DNA, 20 bp, synthetic construct
  misc_feature 1..20: note = Description of Artificial Sequence: Synthetic oligonucleotide
  misc_feature 1..20: note = Target: ANGPTL4; (+) strand; PAM type: YTN; PAM sequence: TTT
  source 1..20: mol_type = other DNA
tcctgcagccaccttgacct

SEQ ID NO: 18852 - DNA, 20 bp, synthetic construct
  misc_feature 1..20: note = Description of Artificial Sequence: Synthetic oligonucleotide
  misc_feature 1..20: note = Target: ANGPTL4; (+) strand; PAM type: YTN; PAM sequence: TTT
  source 1..20: mol_type = other DNA
cctgcagccaccttgacctc

SEQ ID NO: 18853 - DNA, 20 bp, synthetic construct
  misc_feature 1..20: note = Description of Artificial Sequence: Synthetic oligonucleotide
  misc_feature 1..20: note = Target: ANGPTL4; (+) strand; PAM type: YTN; PAM sequence: TTC
  source 1..20: mol_type = other DNA
ctgcagccaccttgacctca

SEQ ID NO: 18854 - DNA, 20 bp, synthetic construct
  misc_feature 1..20: note = Description of Artificial Sequence: Synthetic oligonucleotide
  misc_feature 1..20: note = Target: ANGPTL4; (+) strand; PAM type: YTN; PAM sequence: CTG
  source 1..20: mol_type = other DNA
cagccaccttgacctcaaag

SEQ ID NO: 18855 - DNA, 20 bp, synthetic construct
  misc_feature 1..20: note = Description of Artificial Sequence: Synthetic oligonucleotide
  misc_feature 1..20: note = Target: ANGPTL4; (+) strand; PAM type: YTN; PAM sequence: CTT
  source 1..20: mol_type = other DNA
gacctcaaagcatttcctgc

SEQ ID NO: 18856 - DNA, 20 bp, synthetic construct
  misc_feature 1..20: note = Description of Artificial Sequence: Synthetic oligonucleotide
  misc_feature 1..20: note = Target: ANGPTL4; (+) strand; PAM type: YTN; PAM sequence: TTG
  source 1..20: mol_type = other DNA
acctcaaagcatttcctgcc

SEQ ID NO: 18857 - DNA, 20 bp, synthetic construct
  misc_feature 1..20: note = Description of Artificial Sequence: Synthetic oligonucleotide
  misc_feature 1..20: note = Target: ANGPTL4; (+) strand; PAM type: YTN; PAM sequence: CTC
  source 1..20: mol_type = other DNA
aaagcatttcctgcccctcc

SEQ ID NO: 18858 - DNA, 20 bp, synthetic construct
  misc_feature 1..20: note = Description of Artificial Sequence: Synthetic oligonucleotide
  misc_feature 1..20: note = Target: ANGPTL4; (+) strand; PAM type: YTN; PAM sequence: TTT
  source 1..20: mol_type = other DNA
cctgcccctccaacctgggg

SEQ ID NO: 18859 - DNA, 20 bp, synthetic construct
  misc_feature 1..20: note = Description of Artificial Sequence: Synthetic oligonucleotide
  misc_feature 1..20: note = Target: ANGPTL4; (+) strand; PAM type: YTN; PAM sequence: TTC
  source 1..20: mol_type = other DNA
ctgcccctccaacctgggga

SEQ ID NO: 18860 - DNA, 20 bp, synthetic construct
  misc_feature 1..20: note = Description of Artificial Sequence: Synthetic oligonucleotide
  misc_feature 1..20: note = Target: ANGPTL4; (+) strand; PAM type: YTN; PAM sequence: CTG
  source 1..20: mol_type = other DNA
cccctccaacctggggaacg

SEQ ID NO: 18861 - DNA, 20 bp, synthetic construct
  misc_feature 1..20: note = Description of Artificial Sequence: Synthetic oligonucleotide
  misc_feature 1..20: note = Target: ANGPTL4; (+) strand; PAM type: YTN; PAM sequence: CTC
  source 1..20: mol_type = other DNA
caacctggggaacgacagaa

SEQ ID NO: 18862 - DNA, 20 bp, synthetic construct
  misc_feature 1..20: note = Description of Artificial Sequence: Synthetic oligonucleotide
  misc_feature 1..20: note = Target: ANGPTL4; (+) strand; PAM type: YTN; PAM sequence: CTG
  source 1..20: mol_type = other DNA
gggaacgacagaaaaaaaaa

SEQ ID NO: 18863 - DNA, 20 bp, synthetic construct
  misc_feature 1..20: note = Description of Artificial Sequence: Synthetic oligonucleotide
  misc_feature 1..20: note = Target: ANGPTL4; (+) strand; PAM type: YTN; PAM sequence: CTG
  source 1..20: mol_type = other DNA
ggcacggtggcgcactccta

SEQ ID NO: 18864 - DNA, 20 bp, synthetic construct
  misc_feature 1..20: note = Description of Artificial Sequence: Synthetic oligonucleotide
  misc_feature 1..20: note = Target: ANGPTL4; (+) strand; PAM type: YTN; PAM sequence: CTC
  source 1..20: mol_type = other DNA
ctacactccccgcactctgg

SEQ ID NO: 18865 - DNA, 20 bp, synthetic construct
  misc_feature 1..20: note = Description of Artificial Sequence: Synthetic oligonucleotide
  misc_feature 1..20: note = Target: ANGPTL4; (+) strand; PAM type: YTN; PAM sequence: CTA
  source 1..20: mol_type = other DNA
cactccccgcactctgggag

SEQ ID NO: 18866 - DNA, 20 bp, synthetic construct
  misc_feature 1..20: note = Description of Artificial Sequence: Synthetic oligonucleotide
  misc_feature 1..20: note = Target: ANGPTL4; (+) strand; PAM type: YTN; PAM sequence: CTC
  source 1..20: mol_type = other DNA
cccgcactctgggaggctga

SEQ ID NO: 18867 - DNA, 20 bp, synthetic construct
  misc_feature 1..20: note = Description of Artificial Sequence: Synthetic oligonucleotide
  misc_feature 1..20: note = Target: ANGPTL4; (+) strand; PAM type: YTN; PAM sequence: CTC
  source 1..20: mol_type = other DNA
tgggaggctgaggtgggtag

SEQ ID NO: 18868 - DNA, 20 bp, synthetic construct
  misc_feature 1..20: note = Description of Artificial Sequence: Synthetic oligonucleotide
  misc_feature 1..20: note = Target: ANGPTL4; (+) strand; PAM type: YTN; PAM sequence: CTG
  source 1..20: mol_type = other DNA
ggaggctgaggtgggtagat

SEQ ID NO: 18869 - DNA, 20 bp, synthetic construct
  misc_feature 1..20: note = Description of Artificial Sequence: Synthetic oligonucleotide
  misc_feature 1..20: note = Target: ANGPTL4; (+) strand; PAM type: YTN; PAM sequence: CTG
  source 1..20: mol_type = other DNA
aggtgggtagatcacaaggt

SEQ ID NO: 18870 - DNA, 20 bp, synthetic construct
  misc_feature 1..20: note = Description of Artificial Sequence: Synthetic oligonucleotide
  misc_feature 1..20: note = Target: ANGPTL4; (+) strand; PAM type: YTN; PAM sequence: CTG
  source 1..20: mol_type = other DNA
gctgacacggtgaaaccccg

SEQ ID NO: 18871 - DNA, 20 bp, synthetic construct
  misc_feature 1..20: note = Description of Artificial Sequence: Synthetic oligonucleotide
  misc_feature 1..20: note = Target: ANGPTL4; (+) strand; PAM type: YTN; PAM sequence: CTG
  source 1..20: mol_type = other DNA
acacggtgaaaccccgtctc

SEQ ID NO: 18872 - DNA, 20 bp, synthetic construct
  misc_feature 1..20: note = Description of Artificial Sequence: Synthetic oligonucleotide
  misc_feature 1..20: note = Target: ANGPTL4; (+) strand; PAM type: YTN; PAM sequence: CTC
  source 1..20: mol_type = other DNA
tactaaaaatacaaaaaatt

SEQ ID NO: 18873 - DNA, 20 bp, synthetic construct
  misc_feature 1..20: note = Description of Artificial Sequence: Synthetic oligonucleotide
  misc_feature 1..20: note = Target: ANGPTL4; (+) strand; PAM type: YTN; PAM sequence: CTA
  source 1..20: mol_type = other DNA
ctaaaaatacaaaaaattag

SEQ ID NO: 18874 - DNA, 20 bp, synthetic construct
  misc_feature 1..20: note = Description of Artificial Sequence: Synthetic oligonucleotide
  misc_feature 1..20: note = Target: ANGPTL4; (+) strand; PAM type: YTN; PAM sequence: CTA
  source 1..20: mol_type = other DNA
aaaatacaaaaaattagcca

SEQ ID NO: 18875 - DNA, 20 bp, synthetic construct
  misc_feature 1..20: note = Description of Artificial Sequence: Synthetic oligonucleotide
  misc_feature 1..20: note = Target: ANGPTL4; (+) strand; PAM type: YTN; PAM sequence: TTA
  source 1..20: mol_type = other DNA
gccaggcatggtggcacatg

SEQ ID NO: 18876 - DNA, 20 bp, synthetic construct
  misc_feature 1..20: note = Description of Artificial Sequence: Synthetic oligonucleotide
  misc_feature 1..20: note = Target: ANGPTL4; (+) strand; PAM type: YTN; PAM sequence: CTA
  source 1..20: mol_type = other DNA
ttcgggaggctaaggcagga

SEQ ID NO: 18877 - DNA, 20 bp, synthetic construct
  misc_feature 1..20: note = Description of Artificial Sequence: Synthetic oligonucleotide
  misc_feature 1..20: note = Target: ANGPTL4; (+) strand; PAM type: YTN; PAM sequence: TTC
  source 1..20: mol_type = other DNA
gggaggctaaggcaggagaa

SEQ ID NO: 18878 - DNA, 20 bp, synthetic construct
  misc_feature 1..20: note = Description of Artificial Sequence: Synthetic oligonucleotide
  misc_feature 1..20: note = Target: ANGPTL4; (+) strand; PAM type: YTN; PAM sequence: CTA
  source 1..20: mol_type = other DNA
aggcaggagaatcacttgaa

SEQ ID NO: 18879 - DNA, 20 bp, synthetic construct
  misc_feature 1..20: note = Description of Artificial Sequence: Synthetic oligonucleotide
  misc_feature 1..20: note = Target: ANGPTL4; (+) strand; PAM type: YTN; PAM sequence: CTT
  source 1..20: mol_type = other DNA
gaacctgggaggcggaggtt

SEQ ID NO: 18880 - DNA, 20 bp, synthetic construct
  misc_feature 1..20: note = Description of Artificial Sequence: Synthetic oligonucleotide
  misc_feature 1..20: note = Target: ANGPTL4; (+) strand; PAM type: YTN; PAM sequence: TTG
  source 1..20: mol_type = other DNA
aacctgggaggcggaggttg

SEQ ID NO: 18881 - DNA, 20 bp, synthetic construct
  misc_feature 1..20: note = Description of Artificial Sequence: Synthetic oligonucleotide
  misc_feature 1..20: note = Target: ANGPTL4; (+) strand; PAM type: YTN; PAM sequence: CTG
  source 1..20: mol_type = other DNA
ggaggcggaggttgcagtga

SEQ ID NO: 18882 - DNA, 20 bp, synthetic construct
  misc_feature 1..20: note = Description of Artificial Sequence: Synthetic oligonucleotide
  misc_feature 1..20: note = Target: ANGPTL4; (+) strand; PAM type: YTN; PAM sequence: TTG
  source 1..20: mol_type = other DNA
cagtgagctgagattgcacc

SEQ ID NO: 18883 - DNA, 20 bp, synthetic construct
  misc_feature 1..20: note = Description of Artificial Sequence: Synthetic oligonucleotide
  misc_feature 1..20: note = Target: ANGPTL4; (+) strand; PAM type: YTN; PAM sequence: CTG
  source 1..20: mol_type = other DNA
agattgcaccactgcactcc

SEQ ID NO: 18884 - DNA, 20 bp, synthetic construct
  misc_feature 1..20: note = Description of Artificial Sequence: Synthetic oligonucleotide
  misc_feature 1..20: note = Target: ANGPTL4; (+) strand; PAM type: YTN; PAM sequence: TTG
  source 1..20: mol_type = other DNA
caccactgcactccagcctg

SEQ ID NO: 18885 - DNA, 20 bp, synthetic construct
  misc_feature 1..20: note = Description of Artificial Sequence: Synthetic oligonucleotide
  misc_feature 1..20: note = Target: ANGPTL4; (+) strand; PAM type: YTN; PAM sequence: CTG
  source 1..20: mol_type = other DNA
cactccagcctgggtgacag

SEQ ID NO: 18886 - DNA, 20 bp, synthetic construct
  misc_feature 1..20: note = Description of Artificial Sequence: Synthetic oligonucleotide
  misc_feature 1..20: note = Target: ANGPTL4; (+) strand; PAM type: YTN; PAM sequence: CTC
  source 1..20: mol_type = other DNA
cagcctgggtgacagagcaa

SEQ ID NO: 18887 - DNA, 20 bp, synthetic construct
  misc_feature 1..20: note = Description of Artificial Sequence: Synthetic oligonucleotide
  misc_feature 1..20: note = Target: ANGPTL4; (+) strand; PAM type: YTN; PAM sequence: CTG
  source 1..20: mol_type = other DNA
ggtgacagagcaagactctg

SEQ ID NO: 18888 - DNA, 20 bp, synthetic construct
  misc_feature 1..20: note = Description of Artificial Sequence: Synthetic oligonucleotide
  misc_feature 1..20: note = Target: ANGPTL4; (+) strand; PAM type: YTN; PAM sequence: CTC
  source 1..20: mol_type = other DNA
tgtctcaaaaaagaaagaaa

SEQ ID NO: 18889 - DNA, 20 bp, synthetic construct
  misc_feature 1..20: note = Description of Artificial Sequence: Synthetic oligonucleotide
  misc_feature 1..20: note = Target: ANGPTL4; (+) strand; PAM type: YTN; PAM sequence: CTG
  source 1..20: mol_type = other DNA
tctcaaaaaagaaagaaaaa

SEQ ID NO: 18890 - DNA, 20 bp, synthetic construct
  misc_feature 1..20: note = Description of Artificial Sequence: Synthetic oligonucleotide
  misc_feature 1..20: note = Target: ANGPTL4; (+) strand; PAM type: YTN; PAM sequence: CTC
  source 1..20: mol_type = other DNA
aaaaaagaaagaaaaaaaga

SEQ ID NO: 18891 - DNA, 20 bp, synthetic construct
  misc_feature 1..20: note = Description of Artificial Sequence: Synthetic oligonucleotide
  misc_feature 1..20: note = Target: ANGPTL4; (+) strand; PAM type: YTN; PAM sequence: CTA
  source 1..20: mol_type = other DNA
acaaggggccaggaagctgg

SEQ ID NO: 18892 - DNA, 20 bp, synthetic construct
  misc_feature 1..20: note = Description of Artificial Sequence: Synthetic oligonucleotide
  misc_feature 1..20: note = Target: ANGPTL4; (+) strand; PAM type: YTN; PAM sequence: CTG
  source 1..20: mol_type = other DNA
ggatgtgaacctggacctgt

SEQ ID NO: 18893 - DNA, 20 bp, synthetic construct
  misc_feature 1..20: note = Description of Artificial Sequence: Synthetic oligonucleotide
  misc_feature 1..20: note = Target: ANGPTL4; (+) strand; PAM type: YTN; PAM sequence: CTG
  source 1..20: mol_type = other DNA
gacctgttaaactccagagc

SEQ ID NO: 18894 - DNA, 20 bp, synthetic construct
  misc_feature 1..20: note = Description of Artificial Sequence: Synthetic oligonucleotide
  misc_feature 1..20: note = Target: ANGPTL4; (+) strand; PAM type: YTN; PAM sequence: CTG
  source 1..20: mol_type = other DNA
ttaaactccagagctgcagc

SEQ ID NO: 18895 - DNA, 20 bp, synthetic construct
  misc_feature 1..20: note = Description of Artificial Sequence: Synthetic oligonucleotide
  misc_feature 1..20: note = Target: ANGPTL4; (+) strand; PAM type: YTN; PAM sequence: TTA
  source 1..20: mol_type = other DNA
aactccagagctgcagctgt

SEQ ID NO: 18896 - DNA, 20 bp, synthetic construct
  misc_feature 1..20: note = Description of Artificial Sequence: Synthetic oligonucleotide
  misc_feature 1..20: note = Target: ANGPTL4; (+) strand; PAM type: YTN; PAM sequence: CTC
  source 1..20: mol_type = other DNA
cagagctgcagctgtaaatc

SEQ ID NO: 18897 - DNA, 20 bp, synthetic construct
  misc_feature 1..20: note = Description of Artificial Sequence: Synthetic oligonucleotide
  misc_feature 1..20: note = Target: ANGPTL4; (+) strand; PAM type: YTN; PAM sequence: CTG
  source 1..20: mol_type = other DNA
cagctgtaaatcacatccct

SEQ ID NO: 18898 - DNA, 20 bp, synthetic construct
  misc_feature 1..20: note = Description of Artificial Sequence: Synthetic oligonucleotide
  misc_feature 1..20: note = Target: ANGPTL4; (+) strand; PAM type: YTN; PAM sequence: CTG
  source 1..20: mol_type = other DNA
taaatcacatccctctcctg

SEQ ID NO: 18899 - DNA, 20 bp, synthetic construct
  misc_feature 1..20: note = Description of Artificial Sequence: Synthetic oligonucleotide
  misc_feature 1..20: note = Target: ANGPTL4; (+) strand; PAM type: YTN; PAM sequence: CTC
  source 1..20: mol_type = other DNA
tcctggaccacaggagctca

SEQ ID NO: 18900 - DNA, 20 bp, synthetic construct
  misc_feature 1..20: note = Description of Artificial Sequence: Synthetic oligonucleotide
  misc_feature 1..20: note = Target: ANGPTL4; (+) strand; PAM type: YTN; PAM sequence: CTC
  source 1..20: mol_type = other DNA
ctggaccacaggagctcact

SEQ ID NO: 18901 - DNA, 20 bp, synthetic construct
  misc_feature 1..20: note = Description of Artificial Sequence: Synthetic oligonucleotide
  misc_feature 1..20: note = Target: ANGPTL4; (+) strand; PAM type: YTN; PAM sequence: CTG
  source 1..20: mol_type = other DNA
gaccacaggagctcactggc

SEQ ID NO: 18902 - DNA, 20 bp, synthetic construct
  misc_feature 1..20: note = Description of Artificial Sequence: Synthetic oligonucleotide
  misc_feature 1..20: note = Target: ANGPTL4; (+) strand; PAM type: YTN; PAM sequence: CTC
  source 1..20: mol_type = other DNA
actggccccagttcctgcat

SEQ ID NO: 18903 - DNA, 20 bp, synthetic construct
  misc_feature 1..20: note = Description of Artificial Sequence: Synthetic oligonucleotide
  misc_feature 1..20: note = Target: ANGPTL4; (+) strand; PAM type: YTN; PAM sequence: CTG
  source 1..20: mol_type = other DNA
gccccagttcctgcatttgg

SEQ ID NO: 18904 - DNA, 20 bp, synthetic construct
  misc_feature 1..20: note = Description of Artificial Sequence: Synthetic oligonucleotide
  misc_feature 1..20: note = Target: ANGPTL4; (+) strand; PAM type: YTN; PAM sequence: TTC
  source 1..20: mol_type = other DNA
ctgcatttggaaaatgggga

SEQ ID NO: 18905 - DNA, 20 bp, synthetic construct
  misc_feature 1..20: note = Description of Artificial Sequence: Synthetic oligonucleotide
  misc_feature 1..20: note = Target: ANGPTL4; (+) strand; PAM type: YTN; PAM sequence: CTG
  source 1..20: mol_type = other DNA
catttggaaaatggggatgg

SEQ ID NO: 18906 - DNA, 20 bp, synthetic construct
  misc_feature 1..20: note = Description of Artificial Sequence: Synthetic oligonucleotide
  misc_feature 1..20: note = Target: ANGPTL4; (+) strand; PAM type: YTN; PAM sequence: TTT
  source 1..20: mol_type = other DNA
ggaaaatggggatggttttg

SEQ ID NO: 18907 - DNA, 20 bp, synthetic construct
  misc_feature 1..20: note = Description of Artificial Sequence: Synthetic oligonucleotide
  misc_feature 1..20: note = Target: ANGPTL4; (+) strand; PAM type: YTN; PAM sequence: TTG
  source 1..20: mol_type = other DNA
gaaaatggggatggttttga

SEQ ID NO: 18908 - DNA, 20 bp, synthetic construct
  misc_feature 1..20: note = Description of Artificial Sequence: Synthetic oligonucleotide
  misc_feature 1..20: note = Target: ANGPTL4; (+) strand; PAM type: YTN; PAM sequence: TTT
  source 1..20: mol_type = other DNA
tgacaccccacccctccatg

SEQ ID NO: 18909 - DNA, 20 bp, synthetic construct
  misc_feature 1..20: note = Description of Artificial Sequence: Synthetic oligonucleotide
  misc_feature 1..20: note = Target: ANGPTL4; (+) strand; PAM type: YTN; PAM sequence: TTT
  source 1..20: mol_type = other DNA
gacaccccacccctccatgc

SEQ ID NO: 18910 - DNA, 20 bp, synthetic construct
  misc_feature 1..20: note = Description of Artificial Sequence: Synthetic oligonucleotide
  misc_feature 1..20: note = Target: ANGPTL4; (+) strand; PAM type: YTN; PAM sequence: TTG
  source 1..20: mol_type = other DNA
acaccccacccctccatgcc

SEQ ID NO: 18911 - DNA, 20 bp, synthetic construct
  misc_feature 1..20: note = Description of Artificial Sequence: Synthetic oligonucleotide
  misc_feature 1..20: note = Target: ANGPTL4; (+) strand; PAM type: YTN; PAM sequence: CTC
  source 1..20: mol_type = other DNA
catgccaccatcccttcctg

SEQ ID NO: 18912 - DNA, 20 bp, synthetic construct
  misc_feature 1..20: note = Description of Artificial Sequence: Synthetic oligonucleotide
  misc_feature 1..20: note = Target: ANGPTL4; (+) strand; PAM type: YTN; PAM sequence: CTT
  source 1..20: mol_type = other DNA
cctggcctcatggtgtgggg

SEQ ID NO: 18913 - DNA, 20 bp, synthetic construct
  misc_feature 1..20: note = Description of Artificial Sequence: Synthetic oligonucleotide
  misc_feature 1..20: note = Target: ANGPTL4; (+) strand; PAM type: YTN; PAM sequence: TTC
  source 1..20: mol_type = other DNA
ctggcctcatggtgtgggga

SEQ ID NO: 18914 - DNA, 20 bp, synthetic construct
  misc_feature 1..20: note = Description of Artificial Sequence: Synthetic oligonucleotide
  misc_feature 1..20: note = Target: ANGPTL4; (+) strand; PAM type: YTN; PAM sequence: CTG
  source 1..20: mol_type = other DNA
gcctcatggtgtggggaggg

SEQ ID NO: 18915 - DNA, 20 bp, synthetic construct
  misc_feature 1..20: note = Description of Artificial Sequence: Synthetic oligonucleotide
  misc_feature 1..20: note = Target: ANGPTL4; (+) strand; PAM type: YTN; PAM sequence: CTC
  source 1..20: mol_type = other DNA
atggtgtggggagggggtgg

SEQ ID NO: 18916 - DNA, 20 bp, synthetic construct
  misc_feature 1..20: note = Description of Artificial Sequence: Synthetic oligonucleotide
  misc_feature 1..20: note = Target: ANGPTL4; (+) strand; PAM type: YTN; PAM sequence: TTA
  source 1..20: mol_type = other DNA
ataaggcattaatattcatc

SEQ ID NO: 18917 - DNA, 20 bp, synthetic construct
  misc_feature 1..20: note = Description of Artificial Sequence: Synthetic oligonucleotide
  misc_feature 1..20: note = Target: ANGPTL4; (+) strand; PAM type: YTN; PAM sequence: TTA
  source 1..20: mol_type = other DNA
atattcatcacaggctgggt

SEQ ID NO: 18918 - DNA, 20 bp, synthetic construct
  misc_feature 1..20: note = Description of Artificial Sequence: Synthetic oligonucleotide
  misc_feature 1..20: note = Target: ANGPTL4; (+) strand; PAM type: YTN; PAM sequence: TTC
  source 1..20: mol_type = other DNA
atcacaggctgggtccagtg

SEQ ID NO: 18919 - DNA, 20 bp, synthetic construct
  misc_feature 1..20: note = Description of Artificial Sequence: Synthetic oligonucleotide
  misc_feature 1..20: note = Target: ANGPTL4; (+) strand; PAM type: YTN; PAM sequence: CTG
  source 1..20: mol_type = other DNA
ggtccagtgcctcgcgactg

SEQ ID NO: 18920 - DNA, 20 bp, synthetic construct
  misc_feature 1..20: note = Description of Artificial Sequence: Synthetic oligonucleotide
  misc_feature 1..20: note = Target: ANGPTL4; (+) strand; PAM type: YTN; PAM sequence: CTC
  source 1..20: mol_type = other DNA
gcgactgtaatcccagctct

SEQ ID NO: 18921 - DNA, 20 bp, synthetic construct
  misc_feature 1..20: note = Description of Artificial Sequence: Synthetic oligonucleotide
  misc_feature 1..20: note = Target: ANGPTL4; (+) strand; PAM type: YTN; PAM sequence: CTG
  source 1..20: mol_type = other DNA
taatcccagctctttgggag

SEQ ID NO: 18922 - DNA, 20 bp, synthetic construct
  misc_feature 1..20: note = Description of Artificial Sequence: Synthetic oligonucleotide
  misc_feature 1..20: note = Target: ANGPTL4; (+) strand; PAM type: YTN; PAM sequence: CTC
  source 1..20: mol_type = other DNA
tttgggaggctgaggctgga

SEQ ID NO: 18923 - DNA, 20 bp, synthetic construct
  misc_feature 1..20: note = Description of Artificial Sequence: Synthetic oligonucleotide
  misc_feature 1..20: note = Target: ANGPTL4; (+) strand; PAM type: YTN; PAM sequence: CTT
  source 1..20: mol_type = other DNA
tgggaggctgaggctggagg

SEQ ID NO: 18924 - DNA, 20 bp, synthetic construct
  misc_feature 1..20: note = Description of Artificial Sequence: Synthetic oligonucleotide
  misc_feature 1..20: note = Target: ANGPTL4; (+) strand; PAM type: YTN; PAM sequence: TTT
  source 1..20: mol_type = other DNA
gggaggctgaggctggagga

SEQ ID NO: 18925 - DNA, 20 bp, synthetic construct
  misc_feature 1..20: note = Description of Artificial Sequence: Synthetic oligonucleotide
  misc_feature 1..20: note = Target: ANGPTL4; (+) strand; PAM type: YTN; PAM sequence: TTG
  source 1..20: mol_type = other DNA
ggaggctgaggctggaggac

SEQ ID NO: 18926 - DNA, 20 bp, synthetic construct
  misc_feature 1..20: note = Description of Artificial Sequence: Synthetic oligonucleotide
  misc_feature 1..20: note = Target: ANGPTL4; (+) strand; PAM type: YTN; PAM sequence: CTG
  source 1..20: mol_type = other DNA
aggctggaggaccttggagt

SEQ ID NO: 18927 - DNA, 20 bp, synthetic construct
  misc_feature 1..20: note = Description of Artificial Sequence: Synthetic oligonucleotide
  misc_feature 1..20: note = Target: ANGPTL4; (+) strand; PAM type: YTN; PAM sequence: CTG
  source 1..20: mol_type = other DNA
gaggaccttggagtttgaga

SEQ ID NO: 18928 - DNA, 20 bp, synthetic construct
  misc_feature 1..20: note = Description of Artificial Sequence: Synthetic oligonucleotide
  misc_feature 1..20: note = Target: ANGPTL4; (+) strand; PAM type: YTN; PAM sequence: CTT
  source 1..20: mol_type = other DNA
ggagtttgagaccagcctac

SEQ ID NO: 18929 - DNA, 20 bp, synthetic construct
  misc_feature 1..20: note = Description of Artificial Sequence: Synthetic oligonucleotide
  misc_feature 1..20: note = Target: ANGPTL4; (+) strand; PAM type: YTN; PAM sequence: TTG
  source 1..20: mol_type = other DNA
gagtttgagaccagcctacg

SEQ ID NO: 18930 - DNA, 20 bp, synthetic construct
  misc_feature 1..20: note = Description of Artificial Sequence: Synthetic oligonucleotide
  misc_feature 1..20: note = Target: ANGPTL4; (+) strand; PAM type: YTN; PAM sequence: TTT
  source 1..20: mol_type = other DNA
gagaccagcctacgcaacac

SEQ ID NO: 18931 - DNA, 20 bp, synthetic construct
  misc_feature 1..20: note = Description of Artificial Sequence: Synthetic oligonucleotide
  misc_feature 1..20: note = Target: ANGPTL4; (+) strand; PAM type: YTN; PAM sequence: TTG
  source 1..20: mol_type = other DNA
agaccagcctacgcaacaca

SEQ ID NO: 18932 - DNA, 20 bp, synthetic construct
  misc_feature 1..20: note = Description of Artificial Sequence: Synthetic oligonucleotide
  misc_feature 1..20: note = Target: ANGPTL4; (+) strand; PAM type: YTN; PAM sequence: CTA
  source 1..20: mol_type = other DNA
cgcaacacagcaagacctca

SEQ ID NO: 18933 - DNA, 20 bp, synthetic construct
  misc_feature 1..20: note = Description of Artificial Sequence: Synthetic oligonucleotide
  misc_feature 1..20: note = Target: ANGPTL4; (+) strand; PAM type: YTN; PAM sequence: CTC
  source 1..20: mol_type = other DNA
atctctacgataaattttta

SEQ ID NO: 18934 - DNA, 20 bp, synthetic construct
  misc_feature 1..20: note = Description of Artificial Sequence: Synthetic oligonucleotide
  misc_feature 1..20: note = Target: ANGPTL4; (+) strand; PAM type: YTN; PAM sequence: CTC
  source 1..20: mol_type = other DNA
tacgataaatttttaaaaag

SEQ ID NO: 18935 - DNA, 20 bp, synthetic construct
  misc_feature 1..20: note = Description of Artificial Sequence: Synthetic oligonucleotide
  misc_feature 1..20: note = Target: ANGPTL4; (+) strand; PAM type: YTN; PAM sequence: CTA
  source 1..20: mol_type = other DNA
cgataaatttttaaaaagtc

SEQ ID NO: 18936 - DNA, 20 bp, synthetic construct
  misc_feature 1..20: note = Description of Artificial Sequence: Synthetic oligonucleotide
  misc_feature 1..20: note = Target: ANGPTL4; (+) strand; PAM type: YTN; PAM sequence: TTT
  source 1..20: mol_type = other DNA
ttaaaaagtccgggtgcagt

SEQ ID NO: 18937 - DNA, 20 bp, synthetic construct
  misc_feature 1..20: note = Description of Artificial Sequence: Synthetic oligonucleotide
  misc_feature 1..20: note = Target: ANGPTL4; (+) strand; PAM type: YTN; PAM sequence: TTT
  source 1..20: mol_type = other DNA
taaaaagtccgggtgcagtg

SEQ ID NO: 18938 - DNA, 20 bp, synthetic construct
  misc_feature 1..20: note = Description of Artificial Sequence: Synthetic oligonucleotide
  misc_feature 1..20: note = Target: ANGPTL4; (+) strand; PAM type: YTN; PAM sequence: TTT
  source 1..20: mol_type = other DNA
aaaaagtccgggtgcagtgg

SEQ ID NO: 18939 - DNA, 20 bp, synthetic construct
  misc_feature 1..20: note = Description of Artificial Sequence: Synthetic oligonucleotide
  misc_feature 1..20: note = Target: ANGPTL4; (+) strand; PAM type: YTN; PAM sequence: TTA
  source 1..20: mol_type = other DNA
aaaagtccgggtgcagtggc

SEQ ID NO: 18940 - DNA, 20 bp, synthetic construct
  misc_feature 1..20: note = Description of Artificial Sequence: Synthetic oligonucleotide
  misc_feature 1..20: note = Target: ANGPTL4; (+) strand; PAM type: YTN; PAM sequence: CTC
  source 1..20: mol_type = other DNA
atgcctataatcccagcact

SEQ ID NO: 18941 - DNA, 20 bp, synthetic construct
  misc_feature 1..20: note = Description of Artificial Sequence: Synthetic oligonucleotide
  misc_feature 1..20: note = Target: ANGPTL4; (+) strand; PAM type: YTN; PAM sequence: CTA
  source 1..20: mol_type = other DNA
taatcccagcactttgggag

SEQ ID NO: 18942 - DNA, 20 bp, synthetic construct
  misc_feature 1..20: note = Description of Artificial Sequence: Synthetic oligonucleotide
  misc_feature 1..20: note = Target: ANGPTL4; (+) strand; PAM type: YTN; PAM sequence: CTT
  source 1..20: mol_type = other DNA
tgggaggccaaggcgggtgg

SEQ ID NO: 18943 - DNA, 20 bp, synthetic construct
  misc_feature 1..20: note = Description of Artificial Sequence: Synthetic oligonucleotide
  misc_feature 1..20: note = Target: ANGPTL4; (+) strand; PAM type: YTN; PAM sequence: TTT
  source 1..20: mol_type = other DNA
gggaggccaaggcgggtgga

SEQ ID NO: 18944 - DNA, 20 bp, synthetic construct
  misc_feature 1..20: note = Description of Artificial Sequence: Synthetic oligonucleotide
  misc_feature 1..20: note = Target: ANGPTL4; (+) strand; PAM type: YTN; PAM sequence: TTG
  source 1..20: mol_type = other DNA
ggaggccaaggcgggtggat

SEQ ID NO: 18945 - DNA, 20 bp, synthetic construct
  misc_feature 1..20: note = Description of Artificial Sequence: Synthetic oligonucleotide
  misc_feature 1..20: note = Target: ANGPTL4; (+) strand; PAM type: YTN; PAM sequence: TTA
  source 1..20: mol_type = other DNA
ggagttcaagaccagcctgg

SEQ ID NO: 18946 - DNA, 20 bp, synthetic construct
  misc_feature 1..20: note = Description of Artificial Sequence: Synthetic oligonucleotide
  misc_feature 1..20: note = Target: ANGPTL4; (+) strand; PAM type: YTN; PAM sequence: TTC
  source 1..20: mol_type = other DNA
aagaccagcctggccaagat

SEQ ID NO: 18947 - DNA, 20 bp, synthetic construct
  misc_feature 1..20: note = Description of Artificial Sequence: Synthetic oligonucleotide
  misc_feature 1..20: note = Target: ANGPTL4; (+) strand; PAM type: YTN; PAM sequence: CTG
  source 1..20: mol_type = other DNA
gccaagatagtgaaacccca

SEQ ID NO: 18948 - DNA, 20 bp, synthetic construct
  misc_feature 1..20: note = Description of Artificial Sequence: Synthetic oligonucleotide
  misc_feature 1..20: note = Target: ANGPTL4; (+) strand; PAM type: YTN; PAM sequence: CTC
  source 1..20: mol_type = other DNA
tactaaaaatacaaaaaaat

SEQ ID NO: 18949 - DNA, 20 bp, synthetic construct
  misc_feature 1..20: note = Description of Artificial Sequence: Synthetic oligonucleotide
  misc_feature 1..20: note = Target: ANGPTL4; (+) strand; PAM type: YTN; PAM sequence: CTA
  source 1..20: mol_type = other DNA
ctaaaaatacaaaaaaatta

SEQ ID NO: 18950 - DNA, 20 bp, synthetic construct
  misc_feature 1..20: note = Description of Artificial Sequence: Synthetic oligonucleotide
  misc_feature 1..20: note = Target: ANGPTL4; (+) strand; PAM type: YTN; PAM sequence: CTA
  source 1..20: mol_type = other DNA
aaaatacaaaaaaattagcc

SEQ ID NO: 18951 - DNA, 20 bp, synthetic construct
  misc_feature 1..20: note = Description of Artificial Sequence: Synthetic oligonucleotide
  misc_feature 1..20: note = Target: ANGPTL4; (+) strand; PAM type: YTN; PAM sequence: TTA
  source 1..20: mol_type = other DNA
gccaggtgtggtggtgggcg

SEQ ID NO: 18952 - DNA, 20 bp, synthetic construct
  misc_feature 1..20: note = Description of Artificial Sequence: Synthetic oligonucleotide
  misc_feature 1..20: note = Target: ANGPTL4; (+) strand; PAM type: YTN; PAM sequence: CTG
  source 1..20: mol_type = other DNA
taatcccagctacttgagag

SEQ ID NO: 18953 - DNA, 20 bp, synthetic construct
  misc_feature 1..20: note = Description of Artificial Sequence: Synthetic oligonucleotide
  misc_feature 1..20: note = Target: ANGPTL4; (+) strand; PAM type: YTN; PAM sequence: CTA
  source 1..20: mol_type = other DNA
cttgagaggctaaggcagag

SEQ ID NO: 18954 - DNA, 20 bp, synthetic construct
  misc_feature 1..20: note = Description of Artificial Sequence: Synthetic oligonucleotide
  misc_feature 1..20: note = Target: ANGPTL4; (+) strand; PAM type: YTN; PAM sequence: CTT
  source 1..20: mol_type = other DNA
gagaggctaaggcagagaat

SEQ ID NO: 18955 - DNA, 20 bp, synthetic construct
  misc_feature 1..20: note = Description of Artificial Sequence: Synthetic oligonucleotide
  misc_feature 1..20: note = Target: ANGPTL4; (+) strand; PAM type: YTN; PAM sequence: TTG
  source 1..20: mol_type = other DNA
agaggctaaggcagagaatt

SEQ ID NO: 18956 - DNA, 20 bp, synthetic construct
  misc_feature 1..20: note = Description of Artificial Sequence: Synthetic oligonucleotide
  misc_feature 1..20: note = Target: ANGPTL4; (+) strand; PAM type: YTN; PAM sequence: CTA
  source 1..20: mol_type = other DNA
aggcagagaattgcttggac

SEQ ID NO: 18957 - DNA, 20 bp, synthetic construct
  misc_feature 1..20: note = Description of Artificial Sequence: Synthetic oligonucleotide
  misc_feature 1..20: note = Target: ANGPTL4; (+) strand; PAM type: YTN; PAM sequence: TTG
  source 1..20: mol_type = other DNA
cttggactcgggaggcagag

SEQ ID NO: 18958 - DNA, 20 bp, synthetic construct
  misc_feature 1..20: note = Description of Artificial Sequence: Synthetic oligonucleotide
  misc_feature 1..20: note = Target: ANGPTL4; (+) strand; PAM type: YTN; PAM sequence: CTT
  source 1..20: mol_type = other DNA
ggactcgggaggcagagggt

SEQ ID NO: 18959 - DNA, 20 bp, synthetic construct
  misc_feature 1..20: note = Description of Artificial Sequence: Synthetic oligonucleotide
  misc_feature 1..20: note = Target: ANGPTL4; (+) strand; PAM type: YTN; PAM sequence: TTG
  source 1..20: mol_type = other DNA
gactcgggaggcagagggtg

SEQ ID NO: 18960 - DNA, 20 bp, synthetic construct
  misc_feature 1..20: note = Description of Artificial Sequence: Synthetic oligonucleotide
  misc_feature 1..20: note = Target: ANGPTL4; (+) strand; PAM type: YTN; PAM sequence: CTC
  source 1..20: mol_type = other DNA
gggaggcagagggtgcagtg

SEQ ID NO: 18961 - DNA, 20 bp, synthetic construct
  misc_feature 1..20: note = Description of Artificial Sequence: Synthetic oligonucleotide
  misc_feature 1..20: note = Target: ANGPTL4; (+) strand; PAM type: YTN; PAM sequence: CTG
  source 1..20: mol_type = other DNA
cactccagcctgggcaacag

SEQ ID NO: 18962 - DNA, 20 bp, synthetic construct
  misc_feature 1..20: note = Description of Artificial Sequence: Synthetic oligonucleotide
  misc_feature 1..20: note = Target: ANGPTL4; (+) strand; PAM type: YTN; PAM sequence: CTC
  source 1..20: mol_type = other DNA
cagcctgggcaacagagtga

SEQ ID NO: 18963 - DNA, 20 bp, synthetic construct
  misc_feature 1..20: note = Description of Artificial Sequence: Synthetic oligonucleotide
  misc_feature 1..20: note = Target: ANGPTL4; (+) strand; PAM type: YTN; PAM sequence: CTG
  source 1..20: mol_type = other DNA
ggcaacagagtgagaccctg

SEQ ID NO: 18964 - DNA, 20 bp, synthetic construct
  misc_feature 1..20: note = Description of Artificial Sequence: Synthetic oligonucleotide
  misc_feature 1..20: note = Target: ANGPTL4; (+) strand; PAM type: YTN; PAM sequence: CTG
  source 1..20: mol_type = other DNA
cctcaaaaaaaaaaaaaaag

SEQ ID NO: 18965 - DNA, 20 bp, synthetic construct
  misc_feature 1..20: note = Description of Artificial Sequence: Synthetic oligonucleotide
  misc_feature 1..20: note = Target: ANGPTL4; (+) strand; PAM type: YTN; PAM sequence: CTC
  source 1..20: mol_type = other DNA
aaaaaaaaaaaaaaagaatc

SEQ ID NO: 18966 - DNA, 20 bp, synthetic construct
  misc_feature 1..20: note = Description of Artificial Sequence: Synthetic oligonucleotide
  misc_feature 1..20: note = Target: ANGPTL4; (+) strand; PAM type: YTN; PAM sequence: TTT
  source 1..20: mol_type = other DNA
cagagggaggagagacagaa

SEQ ID NO: 18967 - DNA, 20 bp, synthetic construct
  misc_feature 1..20: note = Description of Artificial Sequence: Synthetic oligonucleotide
  misc_feature 1..20: note = Target: ANGPTL4; (+) strand; PAM type: YTN; PAM sequence: TTC
  source 1..20: mol_type = other DNA
agagggaggagagacagaat

SEQ ID NO: 18968 - DNA, 20 bp, synthetic construct
  misc_feature 1..20: note = Description of Artificial Sequence: Synthetic oligonucleotide
  misc_feature 1..20: note = Target: ANGPTL4; (+) strand; PAM type: YTN; PAM sequence: CTG
  source 1..20: mol_type = other DNA
aggatgatagagggagggag

SEQ ID NO: 18969 - DNA, 20 bp, synthetic construct
  misc_feature 1..20: note = Description of Artificial Sequence: Synthetic oligonucleotide
  misc_feature 1..20: note = Target: ANGPTL4; (+) strand; PAM type: YTN; PAM sequence: CTC
  source 1..20: mol_type = other DNA
tgggtttgatgggagggagg

SEQ ID NO: 18970 - DNA, 20 bp, synthetic construct
  misc_feature 1..20: note = Description of Artificial Sequence: Synthetic oligonucleotide
  misc_feature 1..20: note = Target: ANGPTL4; (+) strand; PAM type: YTN; PAM sequence: CTG
  source 1..20: mol_type = other DNA
ggtttgatgggagggaggga

SEQ ID NO: 18971 - DNA, 20 bp, synthetic construct
  misc_feature 1..20: note = Description of Artificial Sequence: Synthetic oligonucleotide
  misc_feature 1..20: note = Target: ANGPTL4; (+) strand; PAM type: YTN; PAM sequence: TTT
  source 1..20: mol_type = other DNA
gatgggagggagggaaggaa

SEQ ID NO: 18972 - DNA, 20 bp, synthetic construct
  misc_feature 1..20: note = Description of Artificial Sequence: Synthetic oligonucleotide
  misc_feature 1..20: note = Target: ANGPTL4; (+) strand; PAM type: YTN; PAM sequence: TTG
  source 1..20: mol_type = other DNA
atgggagggagggaaggaag

SEQ ID NO: 18973 - DNA, 20 bp, synthetic construct
  misc_feature 1..20: note = Description of Artificial Sequence: Synthetic oligonucleotide
  misc_feature 1..20: note = Target: ANGPTL4; (+) strand; PAM type: YTN; PAM sequence: TTT
  source 1..20: mol_type = other DNA
gtttatgggattgagaggtg

SEQ ID NO: 18974 - DNA, 20 bp, synthetic construct
  misc_feature 1..20: note = Description of Artificial Sequence: Synthetic oligonucleotide
  misc_feature 1..20: note = Target: ANGPTL4; (+) strand; PAM type: YTN; PAM sequence: TTG
  source 1..20: mol_type = other DNA
tttatgggattgagaggtga

SEQ ID NO: 18975 - DNA, 20 bp, synthetic construct
  misc_feature 1..20: note = Description of Artificial Sequence: Synthetic oligonucleotide
  misc_feature 1..20: note = Target: ANGPTL4; (+) strand; PAM type: YTN; PAM sequence: TTT
  source 1..20: mol_type = other DNA
atgggattgagaggtgaagc

SEQ ID NO: 18976 - DNA, 20 bp, synthetic construct
  misc_feature 1..20: note = Description of Artificial Sequence: Synthetic oligonucleotide
  misc_feature 1..20: note = Target: ANGPTL4; (+) strand; PAM type: YTN; PAM sequence: TTA
  source 1..20: mol_type = other DNA
tgggattgagaggtgaagcc

SEQ ID NO: 18977 - DNA, 20 bp, synthetic construct
  misc_feature 1..20: note = Description of Artificial Sequence: Synthetic oligonucleotide
  misc_feature 1..20: note = Target: ANGPTL4; (+) strand; PAM type: YTN; PAM sequence: TTG
  source 1..20: mol_type = other DNA
agaggtgaagccggctaggc

SEQ ID NO: 18978 - DNA, 20 bp, synthetic construct
  misc_feature 1..20: note = Description of Artificial Sequence: Synthetic oligonucleotide
  misc_feature 1..20: note = Target: ANGPTL4; (+) strand; PAM type: YTN; PAM sequence: CTA
  source 1..20: mol_type = other DNA
ggcttctgggtcgggtgggg

SEQ ID NO: 18979 - DNA, 20 bp, synthetic construct
  misc_feature 1..20: note = Description of Artificial Sequence: Synthetic oligonucleotide
  misc_feature 1..20: note = Target: ANGPTL4; (+) strand; PAM type: YTN; PAM sequence: CTT
  source 1..20: mol_type = other DNA
ctgggtcgggtggggacttg

SEQ ID NO: 18980 - DNA, 20 bp, synthetic construct
  misc_feature 1..20: note = Description of Artificial Sequence: Synthetic oligonucleotide
  misc_feature 1..20: note = Target: ANGPTL4; (+) strand; PAM type: YTN; PAM sequence: TTC
  source 1..20: mol_type = other DNA
tgggtcgggtggggacttga

SEQ ID NO: 18981 - DNA, 20 bp, synthetic construct
  misc_feature 1..20: note = Description of Artificial Sequence: Synthetic oligonucleotide
  misc_feature 1..20: note = Target: ANGPTL4; (+) strand; PAM type: YTN; PAM sequence: CTG
  source 1..20: mol_type = other DNA
ggtcgggtggggacttgaac

SEQ ID NO: 18982 - DNA, 20 bp, synthetic construct
  misc_feature 1..20: note = Description of Artificial Sequence: Synthetic oligonucleotide
  misc_feature 1..20: note = Target: ANGPTL4; (+) strand; PAM type: YTN; PAM sequence: CTT
  source 1..20: mol_type = other DNA
gaacttttctgtctagctaa

SEQ ID NO: 18983 - DNA, 20 bp, synthetic construct
  misc_feature 1..20: note = Description of Artificial Sequence: Synthetic oligonucleotide
  misc_feature 1..20: note = Target: ANGPTL4; (+) strand; PAM type: YTN; PAM sequence: TTG
  source 1..20: mol_type = other DNA
aacttttctgtctagctaaa

SEQ ID NO: 18984 - DNA, 20 bp, synthetic construct
  misc_feature 1..20: note = Description of Artificial Sequence: Synthetic oligonucleotide
  misc_feature 1..20: note = Target: ANGPTL4; (+) strand; PAM type: YTN; PAM sequence: CTT
  source 1..20: mol_type = other DNA
ttctgtctagctaaaggatt

SEQ ID NO: 18985 - DNA, 20 bp, synthetic construct
  misc_feature 1..20: note = Description of Artificial Sequence: Synthetic oligonucleotide
  misc_feature 1..20: note = Target: ANGPTL4; (+) strand; PAM type: YTN; PAM sequence: TTT
  source 1..20: mol_type = other DNA
tctgtctagctaaaggattg

SEQ ID NO: 18986 - DNA, 20 bp, synthetic construct
  misc_feature 1..20: note = Description of Artificial Sequence: Synthetic oligonucleotide
  misc_feature 1..20: note = Target: ANGPTL4; (+) strand; PAM type: YTN; PAM sequence: TTT
  source 1..20: mol_type = other DNA
ctgtctagctaaaggattgt

SEQ ID NO: 18987 - DNA, 20 bp, synthetic construct
  misc_feature 1..20: note = Description of Artificial Sequence: Synthetic oligonucleotide
  misc_feature 1..20: note = Target: ANGPTL4; (+) strand; PAM type: YTN; PAM sequence: TTC
  source 1..20: mol_type = other DNA
tgtctagctaaaggattgta

SEQ ID NO: 18988 - DNA, 20 bp, synthetic construct
  misc_feature 1..20: note = Description of Artificial Sequence: Synthetic oligonucleotide
  misc_feature 1..20: note = Target: ANGPTL4; (+) strand; PAM type: YTN; PAM sequence: CTG
  source 1..20: mol_type = other DNA
tctagctaaaggattgtaaa

SEQ ID NO: 18989 - DNA, 20 bp, synthetic construct
  misc_feature 1..20: note = Description of Artificial Sequence: Synthetic oligonucleotide
  misc_feature 1..20: note = Target: ANGPTL4; (+) strand; PAM type: YTN; PAM sequence: CTA
  source 1..20: mol_type = other DNA
gctaaaggattgtaaacgta

SEQ ID NO: 18990 - DNA, 20 bp, synthetic construct
  misc_feature 1..20: note = Description of Artificial Sequence: Synthetic oligonucleotide
  misc_feature 1..20: note = Target: ANGPTL4; (+) strand; PAM type: YTN; PAM sequence: CTA
  source 1..20: mol_type = other DNA
aaggattgtaaacgtaccaa

SEQ ID NO: 18991 - DNA, 20 bp, synthetic construct
  misc_feature 1..20: note = Description of Artificial Sequence: Synthetic oligonucleotide
  misc_feature 1..20: note = Target: ANGPTL4; (+) strand; PAM type: YTN; PAM sequence: TTG
  source 1..20: mol_type = other DNA
taaacgtaccaatcagcact

SEQ ID NO: 18992 - DNA, 20 bp, synthetic construct
  misc_feature 1..20: note = Description of Artificial Sequence: Synthetic oligonucleotide
  misc_feature 1..20: note = Target: ANGPTL4; (+) strand; PAM type: YTN; PAM sequence: CTC
  source 1..20: mol_type = other DNA
tgtgtctagctaaaggattg

SEQ ID NO: 18993 - DNA, 20 bp, synthetic construct
  misc_feature 1..20: note = Description of Artificial Sequence: Synthetic oligonucleotide
  misc_feature 1..20: note = Target: ANGPTL4; (+) strand; PAM type: YTN; PAM sequence: CTG
  source 1..20: mol_type = other DNA
tgtctagctaaaggattgta

SEQ ID NO: 18994 - DNA, 20 bp, synthetic construct
  misc_feature 1..20: note = Description of Artificial Sequence: Synthetic oligonucleotide
  misc_feature 1..20: note = Target: ANGPTL4; (+) strand; PAM type: YTN; PAM sequence: CTA
  source 1..20: mol_type = other DNA
gctaaaggattgtaaatgca

SEQ ID NO: 18995 - DNA, 20 bp, synthetic construct
  misc_feature 1..20: note = Description of Artificial Sequence: Synthetic oligonucleotide
  misc_feature 1..20: note = Target: ANGPTL4; (+) strand; PAM type: YTN; PAM sequence: CTA
  source 1..20: mol_type = other DNA
aaggattgtaaatgcaccaa

SEQ ID NO: 18996 - DNA, 20 bp, synthetic construct
  misc_feature 1..20: note = Description of Artificial Sequence: Synthetic oligonucleotide
  misc_feature 1..20: note = Target: ANGPTL4; (+) strand; PAM type: YTN; PAM sequence: TTG
  source 1..20: mol_type = other DNA
taaatgcaccaatcagcact

SEQ ID NO: 18997 - DNA, 20 bp, synthetic construct
  misc_feature 1..20: note = Description of Artificial Sequence: Synthetic oligonucleotide
  misc_feature 1..20: note = Target: ANGPTL4; (+) strand; PAM type: YTN; PAM sequence: CTC
  source 1..20: mol_type = other DNA
tgtgtctagctaaaggtttg

SEQ ID NO: 18998 - DNA, 20 bp, synthetic construct
  misc_feature 1..20: note = Description of Artificial Sequence: Synthetic oligonucleotide
  misc_feature 1..20: note = Target: ANGPTL4; (+) strand; PAM type: YTN; PAM sequence: CTG
  source 1..20: mol_type = other DNA
tgtctagctaaaggtttgta

SEQ ID NO: 18999 - DNA, 20 bp, synthetic construct
  misc_feature 1..20: note = Description of Artificial Sequence: Synthetic oligonucleotide
  misc_feature 1..20: note = Target: ANGPTL4; (+) strand; PAM type: YTN; PAM sequence: CTA
  source 1..20: mol_type = other DNA
gctaaaggtttgtaaatgca

SEQ ID NO: 19000 - DNA, 20 bp, synthetic construct
  misc_feature 1..20: note = Description of Artificial Sequence: Synthetic oligonucleotide
  misc_feature 1..20: note = Target: ANGPTL4; (+) strand; PAM type: YTN; PAM sequence: CTA
  source 1..20: mol_type = other DNA
aaggtttgtaaatgcaccaa

SEQ ID NO: 19001 - DNA, 20 bp, synthetic construct
  misc_feature 1..20: note = Description of Artificial Sequence: Synthetic oligonucleotide
  misc_feature 1..20: note = Target: ANGPTL4; (+) strand; PAM type: YTN; PAM sequence: TTT
  source 1..20: mol_type = other DNA
gtaaatgcaccaatcagcgc

SEQ ID NO: 19002 - DNA, 20 bp, synthetic construct
  misc_feature 1..20: note = Description of Artificial Sequence: Synthetic oligonucleotide
  misc_feature 1..20: note = Target: ANGPTL4; (+) strand; PAM type: YTN; PAM sequence: TTG
  source 1..20: mol_type = other DNA
taaatgcaccaatcagcgct

SEQ ID NO: 19003 - DNA, 20 bp, synthetic construct
  misc_feature 1..20: note = Description of Artificial Sequence: Synthetic oligonucleotide
  misc_feature 1..20: note = Target: ANGPTL4; (+) strand; PAM type: YTN; PAM sequence: CTC
  source 1..20: mol_type = other DNA
tgtgtctagctaatcaggta

SEQ ID NO: 19004 - DNA, 20 bp, synthetic construct
  misc_feature 1..20: note = Description of Artificial Sequence: Synthetic oligonucleotide
  misc_feature 1..20: note = Target: ANGPTL4; (+) strand; PAM type: YTN; PAM sequence: CTG
  source 1..20: mol_type = other DNA
tgtctagctaatcaggtagg

SEQ ID NO: 19005 - DNA, 20 bp, synthetic construct
  misc_feature 1..20: note = Description of Artificial Sequence: Synthetic oligonucleotide
  misc_feature 1..20: note = Target: ANGPTL4; (+) strand; PAM type: YTN; PAM sequence: CTA
  source 1..20: mol_type = other DNA
gctaatcaggtaggggactt

SEQ ID NO: 19006 - DNA, 20 bp, synthetic construct
  misc_feature 1..20: note = Description of Artificial Sequence: Synthetic oligonucleotide
  misc_feature 1..20: note = Target: ANGPTL4; (+) strand; PAM type: YTN; PAM sequence: CTA
  source 1..20: mol_type = other DNA
atcaggtaggggacttggag

SEQ ID NO: 19007-19037 - skipped (31 entries)

SEQ ID NO: 19038 - RNA, 100 nt, synthetic construct
  misc_feature 1..100: note = Description of Artificial Sequence: Synthetic oligonucleotide
  variation 1..20: note = a, c, t, g, unknown or other
  source 1..100: mol_type = other RNA
nnnnnnnnnnnnnnnnnnnngttttagagctagaaatagcaagttaaaataaggctagtccgttatcaacttgaaaaagtggcaccgagtcggtgctttt

SEQ ID NO: 19039 - RNA, 96 nt, synthetic construct
  misc_feature 1..96: note = Description of Artificial Sequence: Synthetic oligonucleotide
  variation 1..20: note = a, c, t, g, unknown or other
  source 1..96: mol_type = other RNA
nnnnnnnnnnnnnnnnnnnngttttagagctagaaatagcaagttaaaataaggctagtccgttatcaacttgaaaaagtggcaccgagtcggtgc

SEQ ID NO: 19040 - RNA, 78 nt, synthetic construct
  misc_feature 1..78: note = Description of Artificial Sequence: Synthetic oligonucleotide
  variation 1: note = a, c, t, g, unknown or other
  source 1..78: mol_type = other RNA
ngttttagagctagaaatagcaagttaaaataaggctagtccgttatcaacttgaaaaagtggcaccgagtcggtgct

SEQ ID NO: 19041 - skipped
